United States Patent Application Publication US 2025/0320452 A1 - sequence listing, part 12

SEQ ID NO: 8 - DNA, 3977505 bp, synthetic construct (residues 1,988,754-3,977,505 of 3,977,505)
  source 1..3977505: mol_type = other DNA; note = Synthetic E.coli genome
gtctgggtgatttggggcgtgatcgttaatgcctggtttattccagaaattgccagccagttcttcaccatgggtctggtgattggcatcatcggcgttgttttccgccttaacggcatgacggttaataccatggctagttcctttaccgaaggggcgcgaatgatgatcgcccctgccctgctggtgggtttcgccaaagggattttgctgctggtcggtaatggtgaagcgggtgatgccagcgtgttaaataccatcctcaacagcattgccaatgccattagcggtctggacaacgcggtcgcggcctggtttatgttgctcttccaggcggtatttaatttcttcgtgacgtccggttctggtcaggcggcgttaaccatgccgttactggcaccgcttggcgatctggtcggtgttaaccgtcaggttaccgtgctggcgttccagtttggtgatggcttcagtcacatcatttacccaaccagtgcgagcttaatggcaacgctcggtgtgtgcagggtggacttccgtaactggctgaaggtgggcgcgaccctacttggactgctgtttattatgtccagcgtcgtagtgatcggcgctcagttgatgggctaccactaaaaatgttaagagccgcaattgcggctcttttttcattctgccgtttcagtctctacggcttcatttttggcattgcgcttcatccacaacgctagcgctttcaggctgtctggagtgaactcatcgcagcgtgcggtgatttcttccggcgtcagccagcaaacttcactgacttcatcttcctgtagtgcgaagggaccgtgagagacgcagctgaacaatgcgccccagacacggcaatttttatcttcgaaatagaactgcccgtgctcggcaaaggggacaccggcaatgcccaactcttcttccgcttcgcgacgcgcggattccagcagttgctcatcggcctggactacaccgcctgcggtcgcatctaacatgccgggtaaaaagtcttttgtctcggtacgacgctggaccagaattttgcccatgccatcatgcacgacgatgtaagttgcacgatgacgcagacactgtgcccgcatttgttcccggctggcttgtgcaatgacttcgttctcttcattgacaatatccacccattcagtacttgccaaacgacgctgttccattatcaggaaaccttctttttctggcgctcttacggcgcattttgagttgtgggtaaattacggattaatcgcgacctgcgcaatgatactttgatcattgagtgcgattacactaagtacgtcattatccagcatgccataactcgccggattaccgcctttcggaatactcacgctgccggggttgaagtggaaaatctccccccgctgttctgccactggcagatgggtatgaccgtacaccagcacatcgttctggtttaaagcaggcagattttccgggccaaaaagatgaccatgcgtcaaaaacagacgttgtttttccagtaatacctgttgccacggcgcggttatcgggaaatgcagcagcatttgatccacttcgctgtcgcagttgccgcgcacagcgataaccttatgtgccacttcattaagccgttcagcgactttggctggcgcgtaaccctccggtaaagcattacgcgggccgtgattcaacacgtcgccaaggatcaccagccactgggcaccgctttgggcaaacaactccagaacacgttccgtcgccggtaagctcccatgaatgtcgcttgcaaacatcagtttcatcactcactcctcgtcgaaaaaacgtaagctatgatactggattctgtcgttgctatcagccagattgcttcgcgctaagtgcaataaaacgctggacagacgctcgctgccactggaatgttgcataatccaccaggcgttctggcacctcatcgccatgtagtaccaggcggttaatcattagcgccagatcagtatcagcaatgcaccattcaccaaataaattcggctgacccagtactaacaaatgttctgccatcgcgaacagtttctctgcactggcttttccctcggccgttagtggcgcttttttcgcccccgcaaagacaacatccgtcggacgctcttcgcggatgggcatcagatcgctgcgcagccaggcctgaatctgtcgtgcacgcgcacgattttctaaatcaagcggataaatacgttcccaggtcggtgacgcaaatcgatcttccagatactccgcaatggcagaagattcactcaactcaaaatcatcgatttgtaataacggcacacggcgtgtctgaccgtaaccttgccacgtcggctgcaaatgttcaccgctgtcgaggtcgatggtcttgatatgaaagctcaggcctttttcctgcaacgccacccaggcggataacacataaggggagaaaaagtgggcatcactccaaagcgtgatagcgggtttactcattatgtcctcggcaataaagggggctggctatcaaactatagagcctttttgtcactgtcacgtgacgaatactcacgtaagtcgccgcgctttctatacttgtggtgttcagatgattaaacaaccggagctgcaatgatcgatctctatttcgccccgacacccaatggtcacaaaattacgctgtttctcgaagaagcagagctggattatcgcttgattaaggtagacctggggaaaggcggtcagtttcgtccggaatttttgcgcattagccccaacaacaaaattccggcaattgttgatcattctcctgccgatggcggcgaaccgctaagcctctttgagtctggtgccattttgttgtatctggctgagaaaacaggactctttttgagtcatgaaacgcgtgagcgcgccgccacattacagtggttattctggcaggtaggcggactggggccgatgcttgggcaaaatcatcattttaatcacgcagccccccaaaccattccttacgctattgaacgttatcaggttgaaactcagcgtctttaccatgtactgaacaagcggctggaaaacagcccctggctgggaggcgagaactacagcattgcggatattgcctgctggccgtgggttaatgcctggactcgccagcgaattgacctagcaatgtatccggcagtcaagaactggcatgagcggatccgtagccgccctgccaccgggcaggcactgctaaaagcacaactcggtgatgagcgtagcgatagttaacagaaacaggttctcgtgtattatttcatcctaagtaaaacaacggagaacctgcaatggcacaacctgccgctattattcgtataaagaaccttcgtttgcgtacgtttatcggaattaaggaagaagaaattaacaaccgtcaggatattgttatcaatgtgacgatccactaccccgccgataaagcgcgcactagcgaagatatcaacgatgcgctgaattatcgcaccgtaacgaaaaacattattcagcatgtagagaataaccgtttctctttgctggaaaaattaactcaggatgtgctcgatatcgcacgtgaacatcactgggtgacgtatgctgaagtggagatcgataaactgcacgcgctgcgctacgccgatagcgtatccatgaccttaagctggcagcgttaatcgccatatcgggaggctgcatgaacatagtgatcaccggagggacaggattaattggtcgccatttgattccgcgtttgctggagctgggccatcaaattacggtagtgacgcgtaacccgcagaaagccagttccgttctcggccctcgggtgacactatggcaagggcttgccgatcaaagcaacctcaacggcgttgatgcggtaatcaacctggccggagaaccgattgctgataaacgctggactcacgagcaaaaagagcgtctctgccaaagccgctggaatatcacgcaaaaactggtcgatttgattaatgccagcgacacgccaccgagcgtactcatttccggcagcgcaacgggctattatggtgacttaggtgaagtggtggttaccgaagaggaaccgccgcataacgaatttacccataaactctgcgctcgctgggaagaaattgcctgccgggcgcaaagtgacaaaacgcgagtgtgcctgctgcgtaccggtgtagtgctggcaccggatggcggtattctcggtaaaatgctgccgccgtttcgtcttggcctgggcgggccgattggctctggtcggcagtatctggcctggattcatattgatgatatggtcaacggtattctctggctgctggataacgagctgcgcgggccatttaatatggttagcccctacccggtacgcaatgaacaatttgcccatgcgctcggtcatgcgctgcatcgcccggccattttgcgcgtccccgcgaccgccattcgactgttaatgggcgaatctagtgtactggtattaggtggacaacgcgcgctgcctaaacggctggaagaagcgggttttgcgtttcgctggtacgatttagaagaggcgctggcggatgtcgttcgctgatgtggtttacagcaaacatccgccagttaactcccggtgttacaggattagtggctttgcgcgataagatcgtctggactaagtcgggtcaccatcataactaactctctgtctaaacctctatccagcatctcctgagcaatacgcagggcttcttcgtgtttgccctgcattgcgccttcttcacgtaatctgtcagcaatggtcatcagtttctccttttcttgtggtgcgcgttccgctatctcaccaataaatgcacgaaaacgctgggcatcccctgtttgtaatacgtaattaaacagggcttttagctgtctgtcattagtgttccctgtaactagcaggctaacaatttggtcgactaatcccaacagatcgcgctgacgaatatgtttctgaattaactccaacagcgccattttgcggtgttgcataatctcgtcatccggcaccacggtaatatccaccaacggaaaagcgctactatatattttgcgggctatagcaggctcggcaaattcatcaagccagcagagactataaggataaggacttctgcaaccatgataaaacagcatcgggagcaccaatggaagctctttatagcccgcatcaagatggttttgcattgccgcaatggaataacgcatcatgcgaaaagccattaattcttccggcttactttggtgctctatcactacataaatataacccactccctcctgcgttttcacagaccacaagaggtcggaataatattgccgcaggtcttcatcaataaaactgtttggttccagtttaagcgtcgttaaatcacacagtttgcgcagcggcgcgggaagatgaatatcaataaaatcccgcgcggtgtctggatggcgtaaaaaagatttaaataccgcatcatgcggcgtggaagttgtgcttattgtcatggcgttccgtcacccctcaaatttaagatgacgcgacaataaccacgattaacacccaatgcagcaggcagtttttatctttggacagcgaattcagaagtatttttagcggactgtaacttttacatttcagcggaagctgactcgcaaattccccatgaaaatactccggcagcgttagccaccggagaggaaattatttcaggcttcccttaaggaaccgttgcagacgagggctttgcgggttgccaaataactgctccggcgcgccctcttcttctattttcccctgatggaggaaaatgacatgagtagaaacatggcgagcaaagcccatttcgtgagtcactaccaccatggttttcccctcttctgccagttgctgcataatacgcaacacttcgcctaccagttcaggatcgagcgcgctggtaggttcatcaaacagtaaaacttccggttccatcgccagcgcccgcgcgatagaaacacgctgttgctgaccgccggaaagatgcaccggatatttcccctgcgcacgttcgtctatcccgacttttgccagatacttcaccgcccgctcgcgcgcttcctgcttgctcaggcccaacacctgaatcggcgcttccatgacgttttccagcaccgtcatatggctccagagattgaagtgctggaataccatcgtcaggcgtgtgcgcagtaagcgcagttgatttttatcggcgactttgagttgaccgtctttgtcgcgcaccagattgatcgtctggccattgaccacgatgctcccttcactcggtttttcgaggaagttaatgcagcgcagaaaggtacttttcccgcttccgctgcttccgatgatgcttattacatctccggcattcgcttgcagacttacccctttcagcacttcatgttcgccgtagcgtttgtgcaaatcgataacgtttaatttattctcggacatcgtattctcagtgcgtactagaaggtttcacatgctgcaaccagcgtttttccgctctgcgaaagaggctgatcaggacataagagatgattaaatagagcaccgcggcaatgccgaaggcggtaaaaggttgatacgtggcggcgttaatatcgcgggctattttcagcagatccggcaccgtggcagtaaatgccaacgcagtagagtgcagcatcaggatcacttcgttgctgtatgccggtaacgcaatacgcagcgcagaaggcaaaataatgcagcgatacattttaaaagtgctgaagccataggctctggcggcttcaatttccccatgcggaacgctacggattgccccagcaaaaatctcggtagtgtaagcgcaggtgttaagcgtcagcgccagcacggtacagttcaggccactgcggaagaaagcgttaaggaattcggttcccttaacaatctcaagcgtgtacatgccggaatagaacaccagcaactgaacatacagcggcgtaccgcgaaaaatataggtaaataaccagattggaaactggatgtatttattactggagacacgaccaatcgccagaaacagcgccaggactccgcctatcactacgctcaaaataagcagccacagagtgatcgccacaccagtaaagcgataaccgtcggtccacagcagcggtttccagtattcatgtaagatttcgatcacaggtcagccctcttcacacccacggagtagcggcgctcaaggaacagcagcacaccattggaaacagtggtgaaaaccaggtaaatcacgccacagacgatggcgaaatagaacggttcccaggtacttttgcctgccagttgggtggctttgaccacatcttccaggccgagtaagctaaccagtgcggtagatttgaggatcacctgccagttgttgccaatgcctggcagggcgtaacgcatcatgctcggaaacatgatccgccgaaacacttgcccacgagtaaaaccgaacgccgtcgccgcctctatatgtcctttcggcactgccataaaagcaccacggaacgtttcggtaaaataagcaccgtagataaaaccgagagtgataataccagcgaccatcggatcgatatcaatctgcccgacgcccatcgcctccgtcaccgtgtttagcgcaatctgcaaaccgtagaaaatcagcagcatcaacactaagtccggcacgccacgaatcagcgtggtgtacccttcgaaaatcagcccgctaagccgattttggctgagcttaccgccagcgccaattaaaccgatgattacagcgagcactacagagctgatagccagctccagcgtgacgagcgcaccctgtaaaataacaccactaaacccatacaacatgctgcctgtcctgtcgtgtgtggtgaattaccgcctcttgtctccctccggttacccgaagggagcgggctttctttcaccgatggcgattagccaccataaacatcaaaatcgaagtactttttcgctaatttctcgtaagtaccgtcagcgcgcatttcggcaaaggctttgttcagtgcttcgcgcagttcgttatcttctttacgcaggcccatgccggtccctacgccaaacagtttttcatctttaacagacgggccaccgaatttgtaatctttaccgacaggttgtttgaggaaaccttcgctggcagcgacctcatcctggaacgcggcatcaatacgtccggcagtcaggtcagaataaatgttgtcctgcccctgatagctgacgatttcaatgccttttggtgcccaatgttcattaccgaacgtctcctgggtggtgccctgcaatacgcctacccgtttgcctttcaggctctcgactgtcggctgaatgtcagaatttttcgccaccaccaaacgagaatcggcagcgtacagtttgtcggtgaaggctatttcttgctgacgtttttccgtaatggaaaggctactcatgatggcgtcaatcttcttcgcttttaaggacgggattaacgcatccagcggattttcgacaaacgtacattgcgtattgatgcgtttgcataattcctttgccagatcgatatcgaagccaaccagttcgccttgactatttttactttcaaatggcgcataggtcgggtcggtaccgatgcggatgttttgcggaatcgcagcaaacgccgcagttgcgctggagaaggccagaaccagagagaggcttagcaccagttttttcataatgtcctcaactgacagtctttttatagggaatatttacaggtttgttacacttatcgtgccataaaattgaccatcaaggcaaaatatcccgccccgttagacgtattatttttcattaaaaatgcttaagtatgcatttcaatgcaccacgatagtgcaacaaacctggcgtgcaccatgatgatcattccatcaggtacagcttcccagcgacgtatcagtcaccgtagacattaaagtcgaaatactttttcgccatcttgtcgtaggtgccgtcctgacgcagctcgccaagcgccttattgaaggcagccgtcagttcagcatcatctttacgtagccctacaccggtgccatcaccgaagtattttttgtcttttacactactgccagcaaaggcgaaatctttaccagcaggttgcttgaggaatccttcgctggcagcaacttcatcttgtaacgcagcatccagacgtcctgcagccagatcggaatagaccaaatcctggttggcataggccaccacatccacgcctttactacgccaggtctcgttagcgtaagcttcctgggtacttccctgcagcacaccaacatgtttacctttcagactatccagcgttggctgaatcggactacctttggccgcaatcaaacgagaatctgcggcgtacagcttgtcggagaaggcaatctcctgctgacgtttatcggtaatggaaaggctgctaataatagcgtcgatttttttcgctttcagactggggatcagcgcgtcaaagtcactggcaacccaggtacatttcacctgcatccgtttgcacatctcgttaccgagatcgatatcaaagccaacaaaatcacctttagcatctttgctactgaacggtgcgtaggtggtatcggttccgatacgtaccgtctccggtagcgccgcatagctggaagccgctgtggagagaccgactaacaaagacagagcgagaatgctcttcttcatacataaccctcaagtgaaaatggcttttttatgttgtgtattgtgttgtgtgtttgcaggctctttcatgcaggtcttatgccatcttgacgacaacagtaacattcaacgttaaatatgttaataagacgttgcattattgtcctgaagttgaagatagcaggtatagcggttgaatcgcagcgtttcgattgaatggcagaaacaaaatgtcgaggatttgatcgcggttgcaaaattgccctgaaacagggcaacagcggagttatgcgccctgccagcgggcaaagagatcttcaggaagggttatcgcaaactggtcaagaacacgattaaccgtctgatttatcacatcatcaagggattgcgggcgatgataaaacgccggaacgggaggcataatcaccgcaccgatttctgccgcctgagtcattaaacgcagatggcctaagtgcaatggtgtttcacgcacgcagagcaccaacgggcgacgctctttcagcaccacatctgccgcacgggtcagtaagccatcagtatagctatggacaatgccggaaagggttttgatactacagggtaaaatcaccatccccagcgtctggaaagaaccggaagagatgctggcggcaatatcgcgcgcatcgtgcgtgacatcggctaatgcctgcacttcgcgcagagaaaaatccgtttcgagggataaggtctggcgcgctgcctggctcatcaccagatgcgtttcgatatctgtgacatcgcgcagaacctgtaataagcgcacgccataaatcgcgccgctggcaccgctgatgcctacaatgagtcgtttcataaatagttgccctgtcagacttgcaggcagactttgcaggatttcggcgggagttgcaagtcagggtgccagaccggcaccctcagcgaaggcatcatccttcgttatgcatttcgagattttccacttcgttctgacgttgcactgctttggcgtcatcattacgtaacgtatcgaggaaatcgaggtagccctgatcaacatctttggtgacgtagacgccgttgaacacgctgcattcaaactgctggatatccggattttcagcgcgaacggcgtcgatcagatcgttcagatcctggaaaatcaacccgtcagcaccgatgatctggcgaatttcatcaacttcgcgaccgtgagcgatcagttccgtggcgctcggcatatcaataccataaacgttcgggaagcgaatttccggtgccgcagaagcgaggtacactttcttcgctccggcttcgcgtgccatctcgataatctgctcagaagtggtgccacggacgatggagtcgtcgaccagcaggacgtttttatcgcggaactcggcgcggttggcattcagtttacggcgcacggacttacgacgcagctgctggcccggcatgataaaggtgcggccaacatagcggtttttaacgaagccctggcggtacggtttgcccagaatacgagcaatttccagcgcgatatcacagctggtttctgggatcgggatcaccacgtcgatatccagatcttcccattcgcgggcaattttctcgcccagtttcgtgcccatattcacacgcgcgctgtaaacggaaattttgtcgataaagctgtccgggcgggcaaagtatacatactcaaacaggcacggattgctgaccggattgtcagcacattgacgggtaaacaactgcccttcttcagtgatgtaaatcgcttcgcccggcgcgacgtcacgcaggaaatcaaagcccagcgtatcgagcgctacgctttcggaagcgaccatatattctgtacggttctcgtcaatatcacgttttcccagtaccagcggacgaatcccgtttggatcgcggaaagcaaccataccgtggccgataatcatcgccacacaggcatacgcgccgcggattaagcggtttgtggcagcaatggcagcgaaaatattgtcggcttccagcgggtagtggcggaagttgtccagctcgctggcgaagatattaagcagaatttcgctgtcggaagtggtgttgatgtggcggcgtttttcttcaaacagttttttacgcaactcgtgagcgttggtcagattgccgttgtgggcaagcgtaatgccatacggggagttaacgtaaaacggctgcgcttcagaggcgctggagctgccagccgtggggtaacgcacatgaccaatgcccatattgccctgcaaacgctgcatatggcgagcttcaaatacatcgctcaccagcccgttcgctttacgcaaacggaagcagttattggcatctatggtgatgatgccggcggcatcctgaccgcgatgctgaagcaccgttaaggcatcataaatgctctggttaaccggcataacaccggcgataccgacaataccgcacatacgtctttttcctcgttaagccacatctcagagcacttacgctctgggcaagaaactactgctgctttgcagataatcaaaaaaacatctgatgataaaactgaattgcgggatcagctgacttttgctccagtcttcgcttttgctcaccccggtaaaggagtcgagaaagaagagaatggcagcaacaatcaacacaccgcgcaacgcaccgaaacagacgcccagcacccgatcggtgccactcaaccccgttttctccaccaactggcctatcacgaagttcacgatagcaccaacgatcagggtagcgataaacagtaccgcgatggcaatcccatttcgaaccagttcgtcttcaaagcccgtaaaccagacactcaggtaagtgtagtaatgactggcaacaaagaaagcacaaccccatgtcaccaggcttaacgcttcacgaacaaagccgcggatcaggctaaccagagaggaaaaagcaatcaccgcgattatggcgtaatcaatccagaccatatgtgtcccacgattttacgccctgtcatcctgttcggggcgcattctaacagaaaaagaaaacgtttgcgtagggatttccttcccgcgcatcaataaaaatggcgctgaaaaaatattcaacgccatcgactttttatgcctttgcggcatcgggcaatgcgtgtcggatgcggcgtaaacgccttatccgacctacggttctacccctgcgtaggcctgataagacgcgccagcgtcgcatcaggcaagaccgtattaattcggcgtatagcccattaccacgccacttaagccagaaagttgcttcaactcacccaggctacctttcagcttatctttgctggcatccggcccaaccagaatacgggtaattttaccctgcactggcgtggatgggctcgtataaacccgataaccggcaccgcgcagcttaccgacaatctcattcactttatcggcatttttcagcgcacccagttgcacaacataggctttacccgtcggtgcagctttttcttccacgaccggcttcggttctggcttcggcgcaggtggtgcttcaacctttggtttaggcggctccaccggtttcggcttcggtggggcgaccggtgcaggttccggttcaaactcggtgttattggctgcaatagtggccggatcgaggctcggtgctgcggcatcacctgcccgcacctcttccgctgcgccttccggcggctgcgtcggtaacgcctgggtggcggctggcatcatatcaggctcatcacgatcgcccgctttcggcaccagcgggatagccgcgaactcatcctgataatgttttttctgcccgtccagcagccctggaagtacaatcacccccagcgccaccagcacgatcgtgcccactaaccgattctgaaacttacttgccaccgcttctcctcgcgtcaatcacttccatgacatgtgcgaccgtgtggaaagaaccacacaccagcacggtgtcttccgctttagcgtccgccattgcggcatcccatgcctgcgcaacgctatcaaaacttttgccgttacccaaatgctcaagcagttgttctgccgtggcaccgcgcggcccttccagtggcgcacaataccagtcatcaaccacgcttttcaaccaggccagagttccggcaatatctttatcatgtagcataccgataaccgccagcacgcgcccgtttttcggtagcgctttcatacgcccggtgagatattccgccgcatgtggattatgcgcgacatcaaaaataacgcgtgggctctcgctcacaatctggaaacgtcccggcaaaattgcgctggcaatcccgtcgcgaatggcattttcactgacttccagcccgctggcacgcagtgccgccagcgctgttgcggcattcggttgcgggacaagcggcaacggcagattttccagcgtgccgtgagcatcgctaaacgcccagtcatgatcggtgacggaatagttccactcaacgccccgacgttgtaacagtgcacctttttcctgcgccacatcagcaatggtagaaggcatttccggctcaccgacaattgccggtttttcgctgcggaagatgcctgctttctcgcgaccaatactttcgcgatctggacccagccagtcggtatgatccagcgcaatactggttactaccgcgacatcggcgtcgacaatattggttgcgtccagacgaccgcccagccctacttccagaatcaccacgtcaagttgtgcctgcttgaacagccacaacgcgctcagcgtaccgtactcgaaataggtcagggaaatatcaccgcgtgcgctttcaatctccgcaaaagaggcggtgtgggcgctttccggcaattcctggccctgcacacgtacgcgctcggtataacgcaccagatgagggctactgtagacgcccactttgtaccctgccgccatcagaatgctctccagcgtacggcaggtggtgcctttgccattcgtacccgcaacggtaaacacaaatggcgctggtttcaggacgccaagacgcgccgcgaccaggctcacgcgctcaaggccgagatcgatagttttactgtgcaggttttccagataagaaagccagctagccagagggctcgcggcttgaggagtgcgtttgataatcatggtatccgctgattcgttacggtgagaatagcaaaagggcagagccagtggccctgcccttatcagttatcaggcctcaggttcctgatccggtaccgggggtaccactacgccttcacgcggcgcttcaggattcggcgctggcagattcatcaacttcgccagaatgctcgccagtttcaggcgcatttccggacgacggacgatcatgtcgatcgcgcctttctcgatcaggaattcactgcgctggaatccaggcggcagtttttcgcgaacggtctgttcgataacacgcggaccggcaaagccgattaacgctttcggttcagcgatgttgagatcgcccagcatggcgaaacttgcagaaacaccgcccatcgtcgggtcggtcagcacggagatgtacggcaagccgcgctcctgcatttttgccagtgccgcagaggttttcgccatctgcatcaggctcatcagtgcttcctgcatacgtgcgccaccagaggcggagaagcagatcagcgggcagttatcttccagcgcctgctcaacggcacgcacgaaacgtgcacccacaacagaccccatactaccgcccataaaggcgaactcgaatgccgcagcgacaaccggcattccatacagagtgcctttcatcaccaccagcgcatctttttcgccggtttctttctgcgcagatgccagacggtctttatacttcttggagtcacgaaacttcagcacatctttcggctcaagctcgctacccagctccacaaggcttccttcatctaacaggctatgcaggcgattacgcgctgtcatacgcatgtgatggtcacacttcggacagacctcaagattacgttccagctcagcgcggtataaaacctgaccgcagctatcacacttagtccacaccccttcaggaatgctcgccttgcgggtgggagtaatgttgcttttaattcgttcaatccagctcattagggacctttctgtctgaacctggttcgatgccagttttatctttggggacgcataatgccatttttgcccccaacagaccatgaatgttgcacattaaaacataacagcccgaaactttggataaaaaagtggtcgaaccgcggagttactttttattttgcggcgcgtgccgcagcgcgtttgtgacggattatttcgatgacgcccggcaaaatagaaaccacaataatcccgacgatcagcagcttaaggttatcctgaaccatcgggattgtaccgaagaaatagcctgcgtaggtaaaaagcagtacccacaacagtgcgccgatcacgttataagcggcgaaatgacggtagctcatgtggcccattcccgcaacaaacggggcgaacgttctgacgatcggcacaaaacgggcgagaataatcgttttgccgccatgtttctcataaaactgatgggttttgtcgagataactgcgacggaaaattttgctattgggattactgaacaacttttcaccgaacaaccgcccgatagtgtaattgaccgcgtcacccacaatcgcggcgatcagcatcagcaccaccatcatatggacgttgagatcgttggtttccagacttgccaacgctccggcaacaaacagcaaactatcacccggtaaaaacggcgttaccaccagaccggtttcacagaacaaaattaagaacaaaatggcataaacccagacgccgtactccgcgaccagctctgccagatgcacgtcaatgtgcaggataaaatcgatgaggaaataaatcaggtccatatttgcctatgccttgtactcgtcatctttcaggctgtaactacgttggctacagcctgaaatgttccgagcattattctcgttagtccgccagaaatagcgggcccattggcggttttggaagatcataccggtcagggtaatccaccgcgaccagatacagcccttccgcttttgccgttgctgccgccagcgttctgtcctttgccgccagcaactctgctatccagctctccggctggttgtgggcaccgacttccatcaggctgccgacaatattcctgaccatatgatgtacaaaagcattcgctttaatatctaccaccacataaggaccgtgacgcgtgacattaatatgcataacgttgcgccacggggttcgggactggcactgcaccgcacggaagctggtgaaatcattctcgcccagcaagcattgcgcagcccgatgcatccgttcagcgtccagcggttcgtaaaaatgggttacccctttactcagtaccgccgggcgcagccgatgattgtagatgatgtagcgataacggcgagccgtggcgctaaatcgggcatgaaaatcatcaggtacagttttaacccaacgcacagcgatgtcaccaggtaaattcgcatttacgcccaaggtccacgccgcgtctttgcgcagcgcggttgtttcgaaatgcacaacctgcccggtaccgtgtacccctgcgtcagtacgcccggcgcagaagacggtgatgggttcgttcgccacctgggagagcgccttttccagcttctcctgcacactgcggacttcgttctgccgttgccagccgtaatacttactgccgtcgtactcaatgcccagcgcaattttataaactggcggttgttgctggtcggacattagtacagatactcctgcaccagtttctcggcgatttttactgccatcagcgcgccgccaaagcgaacgttatcggccacgctccagaactggacttgctccggcataccgtagtcattacgcacgcagccaacagaaagatgcggcgtaccgctagcatcacctacctgagttgggaattcgttctcttcagagagcacaatatcttcgccttgaacaaacgcatcacgcgcttcttctgctgccagtggacgcagagcttcaaagttgaccatctgggcatgaccgtagaataccggtgcctggacgacgctagcgctaatcatcagcccttcgtcctgcaggattttgcgtacttcgtcaacgatacgacgttcttcacgcacgctaccttcgctatccggcagtaacggcagcatgttgaacgccagctgacgcccgaagaaatcttcttcgtcaatcggaatgccgttgagcaatttcgcactctgccccgctaacgcatcgaccgcttttttgccctgggcggaggcactaatcaggctggtaacgctgatacgacttaaaccgccctgatcgattaacggtttcagtgccgccagcagctggctggtcagactgtctggtacggcgatgacattccggttccggtaatctgtcagtacaaacgggtttacttccggcaccaccagcggtacgtcgggttcgagagcaaacaatccactgctgtcgatcaccaggcaaccactgttggtcgcttcttcaacccaggcagcggtagcttctttgcctgcgacaaaaaatgccagctgcgcctgcgtccagtcgaattcagcggcatcctgcacggtgattgtcttaccaccaaagcgcagttgttcgcctgcgctttcgttacgtgccagtgcataaatttccccaaccgggaactgacgttcagccagcgtttcaagcagggcttcgcccacagcgccagttgcgcccaggacggcaatgttccagccttcagacatggtggtttactccagaaatagcaaagctccctgccaatgttacagcagagagcatgaagaagagattaacgtgccggatgatgaacggcgttaaaacccagtttacacagcaaacttgccgcactggcgtcatcacaaattacatacagagaactccattcacggcgctcaagatagtttttgcgcagtttatcgaactcacccggtatcccggcgactttacgcagcggtgcgtcatcgcggcgcacatcatacaccaaatgcaccagccttttcagcgtcggttgatcgagcgggccatgcagcgtaatgcgaccaaactctggcgcaggcagtaatgtatccagcgcaacgtgctgttcatgcccaataaacttgctataagcttcaaacacttgcgtagtaccgcgtgctttaccttccagggtatagcctgcgatatggctcgtgccgatatccacttttttcagcagctcgacgttgagttccggttcgccttcccagacatccagcactacgcttaacttctggccttcattcaggcaggtcagcaacgcagtattatcgacgactgcgccacggcaggcgttaatcagaatcgctccgggcttcaggctacggatcagtttttcatccgccagatgtagcgttttgtacggaccatctttaaagagtggcgtatggaaagtcagaatatccgcgcgctggactaactcatccaggctgcggaaatcaccctcatccccacggtcggcgcgaggcggatcgcaaagtaaggttttaatccctaacgcttccagtcgcgcctgcaatcgacgtccaacgttaccaacgcccacgatccccaccgtacggtcgtacagactaaatccatcgcgttcggcaagcatcagcagggaggagaaaacatattccaccaccgcaatcgcattacagccaggtgcagcggaaaaaccaattcccgcctgcttcaaccatgcttcatcgacatggtcggtccccgcagtggcagtgccaacaaatttaatgggttttcctgccagcaaagattcattcactttcgtgacgctacgcaccatcagcgcatccgcgtctgccagttgagcgacggggattggacgcccgggaaccgcggtcacctcacccaaacggctaaataagtcgcgggcataaggcatattttcatcaacaaggattttcacgtttgtgttacctgtatgagacgagagttaaccggacaagtgtgccataatctcgcggccaggcatacttgcgaagatttcaggtataaggatacgtaatgatacaacctatttccggccctcctcctgggcaaccaccaggtcagggagataatctgccgtctggcacgggcaatcagcctttatccagtcagcaacgtactagcctggaaagcttaatgacgaaagtgaccagtctgacgcaacagcaaagagcagaactgtgggcgggtatcaggcacgatattggtctgagcggagatagtccgctgcttagccgtcacttccctgccgctgagcataatctggcgcaacgtctgctggccgcgcaaaaaagccattctgcccgccagcttttagcgcaattaggggagtatttacgtctggggaataatcgtcaggcggtcacggattatatccgtcataactttggtcagacgccgctgaatcagctcagtccggagcaattaaaaaccattctcaccctgttgcaggaagggaagatggttattccgcaaccacagcagcgcgaggcgaccgaccgtcctttattaccggcggagcacaatgcgctaaaacagctggtgaccaaacttgcggcggcaacgggggaacccagcaaacagatctggcaaagcatgctggaactttccggggtgaaagatggcgagttaattccagcgaaactgtttaaccatctggtgacctggctacaggcgcgtcagacgctaagccagcaaaatacgccgacgctggaaagtctacagatgacgctaaaacaacctttagatgccagtgaactggcggcgttaagcgcatatatccagcaaaaatatggtctttctgcgcaaagtagcctttcttctgcccaggccgaggatattcttaatcagctttatcaacggcgggttaaagggattgatccgcgtgttatgcaaccgctgcttaatccttttccaccgatgatggacacgttgcaaaatatggcaacgcgtcccgcgctgtggatactgttagtcgcgattatcctgatgctggtctggctggttcgttaaccccgacgaaaactcagtatcgtgacaataatacccagcaccgcagagatcgccccggcaagaaatacgctagagtaaccaaacgtggtcgccagcattcccgccagcggcccggagacgccgagggcgatatcctgaaacgcggcgtaaccgcccagtgcggtgccgcgaacttgactggggacgcgtttaaccacctccacgcccagcgcaggaaagataaggctacatccggctccggttaacgccgcgcccgctaatgcgacccatgcacctggggcttgccagagcagcaacaagcccaccgtttctacaagcagagagacaatcgccactttcacgccgccaaaacggtccggcatccagccaaacatgacgcgcatcacgacaaatgcgccgccaaacgcggtaagagtaaagcccgccatcgcccatcctttgctggcaaagtagaggctaacgaaagtcccgataacagcaaaaccaacgccttgtagtgccagacctaaccctggtttccagataagcccgacaacgctccacaggcttggacgttctcccgccagggccggtactttgcgcactgtgccgttacaggcccacgccagtacgggtaataccattgtggtgatcgccagtgcggcaaaaccgtaatggctatgaatcaacaggccaagcggagcaccaacagcgagggcaccgtaaatcgccattccgttccaactcatcactttgccagagtgttttggccctacgatgcctagtccccaggtcagagcgcctgtcagtaactggctttcaccaaagccaagaatcaaacgcccgacgaccaacagagcaaatttgaacggtgcggagacaggcaaaatcgccgccagcagcaacgcgccgccagccagaccacaagctaacattccctgaagcgcgctacgttttgcaccatattgatcggccagtcgcccggcgtaaccacgcgtcagcaccgtagccagaaactgaatcccgacggcaatgccgaccatggtattgccatagcccagttcatgatgaacaaacagcgggataaccggcaacggcaaccctacggtcatgtaggtgagaaaaaccgcaaaagcgatgcggaagaggctaaaattggcagaagatcgtgtttcggtttggcttacagcagtcatgcattactccagaatgcagcgcaaggcgaggagtatccccgtctcatctctctggtttcagggttacggtgcgttggcaggatttaacgcgtacgtcttttcagaaggaaatcgacaaagcgggaagtttgcctggaactggcggcgattgtcaatgatgtgaaaaagggaaccatcaggttcccttttgcgttagtgccggaggccgcattggcgcgtaacgtcggatgcgacgctggcgcgtctactccgacctactgcgaattaatctttcagcttgcgcattaccagcgtggcgttggtgccgccgaagccgaagctgttagacataacggtggtcagttcgcgatcggtcgtttcggtcacgatgttcagacccgcagcctgctcgtccagctcttcaatgttgatgctcggggcgataaagccgtgttccagcatcagcagagagtagatagcttcctgtacgccagcagcgcccagagagtgaccggtcatggctttggttgcagaaatcgccgggctcttatcgccgaacacttcacggatagctgccagctctttcacgtcgccaaccggagtgctagtaccgtgggagttcaggtaatcgattggggtatcaacgccatgcatcgccatcttcatgcagcgtactgcgccttcgccagacggagcaaccatgtctgcaccatcagaggttgcgccgtagccaacgatttcagcatagatgtgagcaccacgcgccagcgcgtgttccagctcttcaaccactaccataccgccgccgccagcgataacgaaaccgtcacggtgagcgtcgtaagtacgggaggctttttccggggtgtcgttgtatttagtagacagcgcacccattgcgtcgaattcgcaagccatttcccagcacagctcttcgccgccgccagcaaacacgatgtcctgtttgcccagttggatctgctctactgcgttaccgatacagtgtgcggaagtcgcacacgcggagctgatggagtagttaacgccatgaattttaaacggggtggcgaggcaggcagaaacgccggatgccatcgctttggtgaccacatacgggccaaccgctttcaggccgcgcgggccgcgcattgcgtcagcgccgaacacctggaaacgcggggagccgccgccggaacctgcaatcaggccaacgcgcgggttattctggtaagcttccggagagaggcccgcatcagcgattgcctgctccatagaaaggaatgcataaatggatgcgtcgctcataaagcgcacaactttgcggtcaatgaggccagtggtatccagttttacgttgccccagacgtggctacgcatgccggaatccttcagctcctgagagaaagtgatcccactacgtccttcacgcagagatgccaggacttcctgctggttattaccgatgctggaaacaatgcccaggccagtaatcactgcacgtttcattcaatacctctgtaagtcgcacatagagtaagtttcgaatgcacaatagcgtacacttgtacgccgaacaagtccgatcagccatttaatagagaaatttgcgcagccttacacacatcgctaagatcgagccaccgcctgtaagacgagtaacttacgtgaaacactactccatacaacctgccaacctcgaatttaatgctgagggtacacctgtttcccgagattttgacgatgtctatttttccaacgataacgggctggaagagacgcgttatgtttttctgggaggcaaccaattagaggtacgctttcctgagcatccacatcctctgtttgtggtagcagagagcggcttcggcaccggattaaacttcctgacgctatggcaggcatttgatcagtttcgcgaagcgcatccgcaagcgcaattacaacgcttacatttcattagttttgagaaatttcccctcacccgtgcggatttagccttagcgcatcaacactggccggaactggctccgtgggcagaacaacttcaggcgcagtggccaatgcccttgcccggttgccatcgtttattgctcgatgaaggccgcgtgacgctggatttatggtttggcgatattaacgaactgaccagccaactggacgatagcctaaatcaaaaagtagatgcctggtttctggacggctttgcgccagcgaaaaacccggatatgtggacgcaaaatctgtttaacgccatggcaaggttggcgcgtccgggcggcacgctggcgacatttacgtctgccggttttgtccgccgcggtttgcaggacgccggattcacgatgcaaaaacgtaagggctttgggcgcaaacgggaaatgctttgcggggtgatggaacagacattaccgctcccctgctccgcgccgtggtttaaccgcacgggcagcagcaaacgggaagcggcgattatcggcggtggtattgccagcgcgttgttgagcctggcgctattacggcgcggctggcaggtaacgctttattgcgcggatgaggcccccgcactgggtgcttccggcaatcgccagggggcgctgtatccgttattaagcaaacacgatgaggcgctaaaccgctttttctctaatgcgtttacttttgctcgtcggttttacgaccaattacccgttaaatttgatcatgactggtgcggcgtcacgcagttaggctgggatgagaaaagccagcataaaatcgcacagatgttgagtatggatttacccgcagaactggctgtagccgttgaggcaaatgcggttgaacaaattacgggcgttgcgacaaattgcagcggcattacttatccgcaaggtggttggctgtgcccagcagaactgacccgtaatgtgctggaactggcgcaacagcagggtttgcagatttattatcaatatcagttacagaatttatcccgtaaggatgactgttggttgttgaattttgcaggagatcagcaagcaacacacagcgtagtggtactggcgaacgggcatcaaatcagccgattcagccaaacgagcactctcccggtgtatagcgttgccgggcaggtcagccatattccgacaacgccggaattggcagagctgaagcaggtgctgtgctatgacggttatctcacgccacaaaatccggcgaatcaacatcattgtattggtgccagttatcatcgcggcagcgaagatacggcgtacagtgaggacgatcagcagcagaatcgccagcggttgattgattgtttcccgcaggcacagtgggcaaaagaggttgatgtcagtgataaagaggcgcgctgcggtgtgcgttgtgccacccgcgatcatctgccaatggtaggcaatgttcccgattatgaggcaacactcgtggaatatgcgagcttggcggagcagaaagatgaggcggtaagcgcgccggtttttgacgatctctttatgtttgcggctttaggttctcgcggtttgtgttctgccccgctgtgtgccgagattctggcggcgcagatgagcgacgaaccgattccgatggatgccagtacgctggcggcgttaaacccgaatcggttatgggtgcggaaattgttgaagggtaaagcggttaaggcggggtaatctgctctcgcagtgtttgccggatgcggcgtgaacgccttatccgacctacgtgtgacgtgtaggcctgataagacgcgataagcgtcgcatcaggcatgctgctccagacgccgcaacttactgctgactcgcctgctgaaacaggttttcccacatatcggtcaccagcgcctggtcacgcgggctcaattcaccagcaccaatggctttttccagactctggctaacggtcgtatgcaccgcctgagcggagtggtcatcaccactttccagttctgcgatggctaatgtcaggtggccacgcaaatacccactggcaaacaactcatcatcactggcatggtcaaccataccgtcgattaatgccagaatgcgactttcaaactccgcgatcatcttctttcctcattgtaaaacgtggcgctggcttcagttgagcgcttccggccacgggaactgttccgccgtaagttccggcgtgtgataataattttgtagtgctttaatgaagcgtgccggacgttccggaatgccatttgtcagataatccatcacctgcgcatgtactcgccgttgaaacaccacacgatccggttcgaaatccccttccagattgtcgcaactgacgttaaacggatatcccgccgccacacagaacaaccagtcgagcgcctgcggcttcacttcaacatcttcaaactggctttgcgtttgggcatcgcgtccgtccgggcaataccagtagccgaaatcaaccagctcacggcgcgctttcccggcaatacaccagtggctaatctcatgaattgcgctggcataaaagccatgagcaaagacgattcggttatacggtacttccgcatcagcaggaagatagatcggttcgtcgtcgcctttaatcagacgggtattaaaatcatcggcaaagcagctattaaaaatttcaatcaactgctcgtagtggtgtgtactgttcattagttcatccccaaccagtggaggatctcctgtccgtggctgtcgtaaagtaatttggcactcatcaccgcgctgacgataacaatcatcgggcggatcagcttttgtcctttgctcaacaccagtcgactacccatgcgcgcgccgaggaactgccccaccagcatgacaaagcccgtcgcccaaatcactttgccgccgagaataaacagcagtaaaccgccgatgttactcgttgcgttgagtaatttggcgtgagccgtggctttggcgaggttaaatccgcacagcgtaacgaaggccagcgcgtaaaagctcccggcagccgggccaaagaatccatcataaaaaccgacgcagccaccggctattaacgcgaagggtaaaccgtacatccggcgctggcggtcttcttcacctagctttggcatcagcaagaaatagaggccgatacaaattaccagaatgggcaaaatctgccgtaagacatcagcctgaacgtattgcaccagcagtgcgccgctcatactgccgacaaaggtcatggcgatattgagtttctgatcgcttaaactaaccactttgcggcgaataaagtagatagtagcggaaatagagccgccgcaggcttgcagtttattggttgccagcgcattagcgggagacatccccgctgccatcaatgccggaatggtgagtaacccaccgccaccggcaatgctgtcgataaatcccgccagcatggcgacaaaaaagagaactcccagcaacagcggggaaaccataaacaggctattaaacgtttccattagatcacgtgctcatccagtagcgcctggcaggaaggcggcaacggaggcggtgtcttcttctcaggctttgttgttcccggttttggaggttcaaaccagctttgcagttctgccccgcaaccatcgccacttggcggtaaaggttgatcttcacactccagactatcggcagggcaacgtaatcgtacatgcatatgcgcgcgatgctggaaccagggtcgcactttgcgcaaccagtcgcgatcggtgcccgcatcaaggcaaagttgttgtttaatcgccggattaacaaaaatgcgcgtgacgtctttgtcctgggcggcgagtttgatcaagctgaaaatttctggcttccacagcgtggagacaacgtgtttaccgtcgcgggaaactaagtccagtgcttgcgggcgcaagagctgcgcggaggtccagcgagttttcggcagttgcagaaagatatcgacatccagtccggtctggtggctggcatgaccgccgttgaaacgcccaccagcgggcatccccatatcgccaatcagcaccgtacccatgcccagattgctcacctggctactcagacgctggataaacatcaccagatccgggtgaccgaaatagcgacgctgatcggtacgcatgacctgataatgttcggactgtatcggcagcgtgtcagcgccgacaatacagccattagaaaaactgcctatgctttgtgcgctacccggcacaggttgggttattttttgccacggcgtcgctgccaggctggcgctactggcaagcagagccagcagcgcaatcgcggttttattcattttttaccagcgtggaatatcagtcttcacatcggcattttgcgcccgttgccgtaacaggtgatccattaaaacgatcgccagcatcgcttctgcgatcggcactgcgcggatcccgacacagggatcgtgacggcctttggtgatcatctcaacttcttcgccaaagcggttaatggtacgacccggcacggtaatgctggaggtcggtttcagcgccatatgggcaatgatttgctgcccgctgctgataccgccgagaatgccgcccgcatggttgctctggaaaccgtctttggtgatttcatcgcggttctggctgccgcgcagcgccaccacgtcaaagccgtcgccaatttccacgcctttcaccgcgttgatgctcatcagcgcatgggcgatgtcagcatccaggcggtcaaagaccggctcgccaagtccggcaggaacgccactggcaacaacggtgactttagcgccgatggagtcgccctcttttttcagcgcacgcatcaactcgtctaacgcgtcgattttgtcggggtccgggcaaaaaaacggattttgctcgacctggctccagtctttgatatccagcggaatgtcgcccatctgggtcaggcagccacggatttcaataccaaatttctcggcgagatattttttggcaatagctcctgccgccacgcgcatggcggtttcgcgggcggaagaacgtccaccgccgcgataatcgcgcagaccgtatttttgttcgtaggtgtaatcggcatggcctggacggaaaacgtccttaatcgcactgtaatcctgagagcgctggtcagtgttttcgatcaacaagccaatgctggtgccggtagtaacgccttcaaaaacaccggagagaattttgacctgatccggctcgcggcgctgggtggtatagcggcttgtcccagggcgacgacggtcgaggtcatgttgcaggtccgcttccgtcagcggaatgcctggcggaacaccatcgacgatgcagccgagcgccagcccgtggctttcgccgaaggtggttacgcgaaagagttgtccaattgtgtttccagccatcacggctccgttattgttgtgtttgcgtgtttacttaatctttataaatcgcgaaatgttctcgtgcggcaataagctgctctttggtgagcataaacacaccatcgccgccgttatcaaactccagccaggtgaacggaacatccggatattgttccataagatgtaccatgctgttgccgacttcacaaatcaacacgccatcatcagcaaggtaatctgccgcgttaccgagaatgcgacgcgtcagtttcaggccgtcagtgccagatgccaggcccagttccggctcgtggcggtattcgtttggcaggtcggacatatcttccgcatcgacatacggcgggttagtgacaatcaggtcgtactgcactttcggcaagtcgcggaacagatcggaacgaatcggaatgacgttgtggatcagaccgtgttcttcgatgttctgttcagcaaccgccagcgcgtctggagagatatccaccgcgtcgacttctgcatccgggaaggcataagcacaggcaatggcgatgcagccgctaccagtacacatatctaaaatatgctgcggttgcttgctgataagtccggcaaatttattgttgatcagttcaccaatcgggctgcgcggcaccagcacgcgttcatcgacgtaaaattcatggccgcagaaccacgctttgttggtcaggtaagccaccggaatgcgttcattgacgcggcggatcacgcgttcaacaatacggtgtttttcgctggaggtcagacgcgcggtgcgcatatcttccggaatatccagcggcaggtagaggctaggcaacaccagctgtacggcttcatcccacgggttatcggtaccgtgaccgtaccagatatttgccgcgctgaagcggctcacgctccagcgcaacatgtcctgaatggtttgcagctcatttactgcttcatcaacgaaaattttatccacgtattcctccagggcatgatcgcaataatttcggcggctagtttgccatgaagatgacgataaatcagcattcacgcgcggtgagtgaggaaaaatacgtttaaaacgatcgattgcgctacgagtcgggtaaactgtaggaaaattagaaatagagacagataaatgaaaaagaaaacaacacttagcgaggaggaccaggctctgtttcgccagttgatggcggggactcgcaagattaagcaggacacgattgtccaccgaccgcagcgtaaaaaaatcagcgaagtgccggtgaaacgcttgatccaggagcaggctgatgccagccattatttctccgatgagtttcagccgttattaaataccgaaggtccggtgaaatatgttcgcccggatgtcagccattttgaggcgaagaaactgcgccgtggcgattatagcccggagttgtttttggatttacacggtctgacgcagctgcaggccaagcaggaactgggggcgttgattgccgcctgccgccgtgaacatgtgttttgcgcctgcgtgatgcatgggcacgggaagcatattttgaagcaacaaacaccgctgtggctggcacaacatccgcatgtgatggcctttcatcaggcaccaaaagagtatggcggtgatgcggcgttgttggtgttgattgaagtcgaagagtggctgccgccggagttgccctgaggagttgagcgcgttgcgccaggtacgggtaatggcaggggcgaatgcccctgcctggtgtatctaagggttacaactcattcagtatgtactggaaccggcaagtagaatcgattggctgcatactgctggtatcaacacgcacgaccatatcgtgtaactgtttgtccgttatagggtgtcgatttggcgtgacgctgacttccgccttgtcacatccgctcgcggtaaaagttatcatctgtgcaacccagcggcagtaaccacctgtttcattcatctgcgtactgtcgcacaacttcccatctttcatcaaatacgtactaagcgttttctcaaccacaccgcccgtgctctgcagggtgagcagtttactcttactgacataattctcattccaactaacgtcataaggttgaacagaaacggatggacaaatcgtgtcgtgactatcaggcccctgatacgtcacgccccctggagaggcttcagagtcattcataataaccaaccatggacaagaaaagtaagattcaatctctgcagagacaataacctcaaatgtataatacccgcagttccacccagacggtaatccaggacaacttgctttgttgatattttgatggtagccaatcagcttaacgctaggggcaggaggaggaccactccagctcacattttgcaatatttccccagtcatgagccattgactacttttatattcaccaacgtacactgcggatggcatcattatttttaaattaaaagtcgcaatattacggctatcaccgttgtaaccgtagtaaacgtcaacgctatgcccggcagccatagcttctgtagtagcaataagcatgaccagagcgaacaaccatcgtagtattttcattttaaatatactcaaatgtcgcagttaaagaggcggtaaattcaccgatcgtcacatcacggccgcttttcgcctgtagccaggctctgaaattgatatcgttattgccattggttagcgcaaaggtcgccccatttgtattgttgatggcaacctgcattccgtcggttttttccatgccaattcccactccctgagcggtactactcgtatccagtgccagaaaaccgggttgttcgctgtcttctacccccgtgagcgtgacttttacgttgtatcccgccggccctttgcaatctttcagcttaaagactacgggtacacgagcggactggcctgcaacgttcaaatcctgacgactgaccgtgggaaagcgcacctctgccagatattggccatccaccaccagcgcacaggatttacttaataaattaccggagaaatgcagattattatctgccgcgaataacgtgctactcattgccaatatcagccccgctaacaggacgtaaccaccggactgaatcatacttttattcattgataatccacccgtaatgttgcgtaagcgctaaaattcgtatcgcttaacacagcatcactcgcttttaccggtacggcctccagcttcggcttttgcgtaaaatcagtggcgttgatagcaagcggagtattgagtttaaaacgctgaccatcgtgctgaagctcgataccaaaaccgggtacatcagtttcaattgctgcatcattaaaactggtttgtgtaccagtccaggtgagggtcatctcccaatctggatgacgggtcgtgctgtcacaagtgagttcatatggcacctctttacgaccatagttgccgttgatgtcgtcgataatgagatcgcgaaattcgacttcaatggttttaccaccgctgatgctacaggttggcggactcaataatgtcccgtgaaaggtgatgtcttcatcagcagcatgagctatggcgctactgacacaaagcagggttaagaaagtctttctcattgatagtccaccaccatggtcaaactggcgttaaactcgcccgcagcaagttgcgccccgcttgccttcacaggtacagccttcaactgtggctggttattgatattaaatggcgtccagctattttcaccgacggcaaacaaactgttatcggcgctattttctatccgaatgcccagcccggtgatattggtactgagtaccgtttcgccgttaatcgtactggtattgcccttaagttgcatccgcaagtcgttagcaagactgtttgtgcagttcaacgtgtatttcgcatcttgccgataattggtgccatcaacgttatcagcaatcatattgccgaactctacctggctgcccttgatactacagggtggcggagcatcgaccaacacgcgcagaattaaatccacgggtttactaccagccatagcagataaactacagacactgcataccagcagccctgcgcccactacaaacttttgactcataactccccccgtcatcagcctttgcggctctgctcttcatccacctggcagctgttgccattgcactggaagaacagcggcatccgtgcgccaaagtcgttgacgtaagtcagcaccggtacgctatccattttcacattcagcggtaccgtggttttcggctcaatgaccagagggctgaaccctgcagctggattaccgtttttctgcgcactggcgttgctgataatcacgtagtacggcgttgggttattgacggtaaatgcctgaccgctgcgggtgagcgtcaccttgtgctgccacggacttttcatactgaccttttccagcgcctttggtcgccagaacaacttgatacgcgtttgcagcgcgatttgcagggtattgggtttgttactttttggcgggatctcgcgcacgttaaagtagaacatgctttcacgatcggctggcaatttgttgatatccggcattccctgcacttttacctgcccgttcatcatactatcgatgcgttgcactggcggcagcacagttaacgggctggtgatcttgttacccttttcatcttcaatccagctttgagccagataagggagtttcggatcgttattacgcagcgtcacgctgatacttttgtcgctttcattaaatatcaaacgggtacgatctggcgttacagacgccagggcagacaaactggtagcgctaagcagtaacgccagcgtcatagcacccaatttggcagagcaaagtaaatcagacatggatcattccttaatcacgttattggttagcactaacagaaacagggggatcggtgggtgtcacctgttgcgtctgctcctgaatgacaggctttatgtcatcaggaacaaccggcgcgacgttgcctttatgctggcatggcagtaacaagccgttaaacagatcggcaggcagcgggtccggcaggttgatatcgcaatgcgcaacaccactccagaacacactcatatgttcgccaggtttcaccccagccagatagacactaccgtcatcatcgacaaggcccactgtctgctcgttatcattttttacttctgcgccaaacggtggatggctgccatcttgtaaacgcagcaccgccatcgctttttgaccactgatgacggcaaatttgcggtagccaatggctccttcagttagcgtggcttgcaccacgctctgggttgcttcggcgttttccggcaatttgttgaggtcgatatacgcctgattgcgataataattgttaacgtcagaaacgacggctttaccaaacatattggtataaacagcagccccgttaccttccaccggaacatcggcaacgccatcggcatcaatcagcaggcgtgtcccgcccatattctgggtacggtgaagtgcgccgccgtgggtagtaagcgttgcgccgccctgtaagctcaagcccgcagaggtgtattgcccttcatggtagttcgcactgaggtcaacctgcgccaggctaccatcatggctgtagtagccatcaacgctggtgtgtttgtcactggtgccgatgttcaactgatagtgagtcgcgtcatcgacacggctaaaataaccgacctggctgctgtccgtcccactgccatagttgccgttatagctaacggtactgttgtcgccccacggcatactgagcgaaatttacatgcccttatccgcccggttgtcatactcgtagcggtagccagtcagggaaacgctcatattacgaatgctgcccatattgaaatagtgggagagcatgatgttgtagtttgtctgctcctcacgatcccagtaggtatggcgggtatagttgagataaacgctaacacccgcatcgcggaagttctggttataagtggcggtgtacatctctttgtcgttgcccgtacggaccatttcgctgtcactggcatccagatactcgctcatggtcataaagttctcttcgctgaagcgatatccagcgaaagtgacgcggctgttgagctggtcaaagtctttggaataactcacacggaaggagttaccgtccaggctacctttgccataagcggtgtctttatccagtttggtatggctatgagtaacatcaaacgcgaccgcgccgaaggtagacaaatcgcgaccgacgcccagcgccgcagactgatagttttcatcacccagcgcaccgccatataagctccagccgttagcgatgccccaggaggcttcagcaccagagaaaaatcccccctcgacatggtggccccactcttgcggacgtcccatcatgatcttatagcgaacctggcctgggcgagtgaggtatggcatgctggcggtgctgatgtcatattcctgcacctggccgttctgttcttcaatgcgaatatgcaacgtaccggagacggaatcaccaagatcctgaatacgaaacggtccagccggaacctgcgtttcgtaaatcacacgccccatctggctgacggtcacttttgctgtggtgtgtgccacgccggaaatgtctggcgcgtagccgcgcagattgggaggcaacatttgatcgtcagtgctgacactgccaccaacataattaaaaccgtcgaaaatatcggaattgaggtaatcttcgcccagcgccagtttggcttttaaactcggtaacgcccgccaggcataatagcgactccactcccattttttttgtgtgtcatcgccgccaaattcatcgtcatcatcattactgcgcgtatgttgatagttggtctgccagtcagcgcgcatacgccatggccccaggttaaccccgaccgtcccgttgccgctgatctcgttactgtcatcgccgccattttcttcgtgtcgtgtttgcgcagtgatgctgtagtccgcaatgatcccggagatgccatcatcccaacgagaaggtggatcccagtcgggccaggcatattcgaggtaagcctgcggtagactaatgactaatgcggactggcttaaatcagccttaatttccacgccttccagttgaccgggcttcaggcatttaccatcgtggctccattgcagatttttcgccacgtcttcttttaaaccaaactgcgccaccagttccggtgtcagacaagcatagcttttgctaacgtcatcttcaccagcataccagtaaatatcgtactcttccgccaatggctgtttatttagttgaacctgtaaattgtattttccgggctcaacatacccctggctggaaaaacgcttcagatcaatttttgtgtcgccttttaattccagaaaacgggaatcaaactgaatgtcgtcttcagcccagacactgctataactcccactcattgccagcgcaatgcaccacggaagaatccgtaatcgaaaaagagaatggtcaggcatacacgtttttatccgtttttattcttgttcggtcaaaatccatttaaataccccatagcagtgtcgctatgggggtatgccttacaggtaagtaatctggaaggtggtatttgcttcgaaattacccagatctggcgcatcagctgcgccgaccagccaggctttaaagttcagagtctgcttcgctttgcctttattagtggcagtatctttcacgattttctggtcaatacccatgccgcttttgtaagaggtacccagagagtcaccgatcgccaggctaacattgttaaatgccgcaccggtatcggtattgaaaatggtgtaataattgccgctatttgcagaagaaacggtaccagtaaaggtagtggtcattgtttcctgagtatcaaatacgcaatcttgcaggcgaatctggaaatttttcggcgtggtggtgccgttatttttcagtttttcggcaccgatatcacccatatcaacttccagtttgtgatcgtccggaacgatagaacacacactgtcttcaatggtgccgtaaaaacgtgcagtaccgttgttacccgcagcgattgttgccgtagaggtgaacgcgcccatcaccattgccgcagcaatagctgttttaacaaacttactcattatttgtccttaaactataaataattaaaatataaacattgcaatacattgattcagtcaatagccaatgtttatacccagccattgaatacggcatgcgatccaaaaaaacaggtcgtaaaaaatgtattcgttggtgtggggtcgaatagtgatgttttcactcccctgattcaatttaattttactaatgagtaaatgtagatttaattaatatattgataggggaaagattatcttaaggatcttctaaaaaaacacgaaatatatatttagaaaaaacaggaagcatatcaacaatgaatgccaatagcttaaaaaacaaacaatgaacatataatgcgattggcattaacccgcttttgtcgatataatatataaacactatagccagaatttaatcaagtttcaattacgtcctgcctgattattcaactctattttctccattatctgtattaataaatgataatgagtgtcaaacagacattattcatttcaacatgtaactttgggcaaaatcaagatacgcgcagaagaatactttccgaatgaaagttaaaggtgttttatttatagatggggagagtcttcgatagtagtgaggttgacagatatccgctgcctgatgagcaattatgcccaatgaatctacctcattgggcataatttggaactcatcagatagcttttgccatcttcagattacacgggctcatctgccagttgaatgtgccgtttccgctttcatcaagcgttacgctggcaatggcgctggtggtaaacataggcggcgtttcgcccggacataactcggcaaccagatacccgactaacggtaagtgagagatcaccagtacgctagcaacaccttcattggtcaacgcctgcaaataggcactgaccagaccaacatcgccgcagggcgttaactccggcagaacttctgcactggaaggcaggttcagacaatcccctacttcttccagtgtttgctcggctcgcaggaacgggctcaccagaacgcgttcgatttccactttttgacctttcagccagttcgccatcaggcgagattcgtcacaaccattagtggtcagaggacgaacggaatcactggcggcatcgagggctgcgtcgccgtgacgcatgataaaaacttgcatattgcaccgcttttgttaaccagattcgcccgttttctttcatctgaaaccagagaaagaaaacggtggccggcattgtgccttatccattcaccgaatgaaacgctgttttttacctcaatggcgtaagtatagtcaatatgcgtttacattttgaccaacactccgccattcagcgcggattcatatagctttgaccttcttattgcaggtcagttgcagttgttttccaaaaactttccccacgcgcgcccatctcgaccaaacgctcgcaaggggtaaaacgggaaccatactgcgtggcaagtcgttgcattattgcaaccacttcgcccgcgccgagagaatcgatatagcggaacggtccaccgagaaatggcggaaaaccaatgccaaataccgcgccaatatccccgtcacgcacgctacggataacctgctcatcaacacaacgtactgcttcattcagcatcaacatcacacaccgttcagcaacctgcggtgcggagattcgcccctgcccttgtgtgccaatcagcgggtaaatggcgggatcgacctgttttttgcttttacgccctttctgaccataaagatagaaaccccggccattttttctgcctttgcgatcgtcgttcaaaatactagaaacaacatttgcaggcgcgctaaaacgttctccataagcggcttccagtacaggaataattttagtcccggtgtcgattcctacctcatccaaaagttggattgggcctaccggaaaaccaaatttcactagcgcggcatcaatgtgctctacccgttcaccttgggtcaacatgcggatagcttcattaatgtaaggcgctaagatgcgattgacgtaaaaaccggctttgtcacgcacgacaattggcgttttaccctgttttttcgccagttttactgtggtagcgatggtttgcgcgcttgtccccgcatgaggaataatctccaccagcggcattttttccaccggactgaagaaatgcaggccgataacttgctcaggtcgcgtggcgtgagcggcgatatcaccaatcggtaaagaactcgtattgctagcaaagatggtatgagcggcgcaattttgctcaacttccgccaccatctgttgtttcaattcgagattttcaaacaccgcttcaataatcagatcgcgatgggcaaagccgcgatagtccgtcgttccggagattaatgccagctgtttgtcacgttcgctggctttgagatgacgacggcgaactttgccctccagctgatcccaactgtacttcagcgcatgatttatgccctgcgggttgatatctttaattctgaccggaatccccgctttacaagcagtgacataagcaataccgccgcccatcaagccaccacctaaaatccccacgctgtttaatggcgcaggcggcgcatcactgccgggatctttcttcacgtccgtactggcaaaaaagatactacgcagcgcctggctttgtggcgtcatcgccagttcgccaaacgcccgagcttcggcgtcataaccgctgctggtgccctgcgctaatcccgtttcaacaacctccaggatgcgttctgtcgccggataattgccttgagttttgtgttctgttttcttgccgaccattttgaacagcagcgcacgacctaacggccccgccagaatacgctcgcgtacaggtagagggcgggaagatgggcgctccttctttgccagctcaacagcggcttccagcagaatggagtgcggaacaacgtcatccaccagccccagctttaatgcctgtttcgcccgaagttgttttccggtgaggatcatctctaatgctgtgctgacgcctatcagacgcggtaaacgctgggtgccgccactaccgggtaacaatccaagttgtacttcaggcaaaccgagcaccgttttaggatcgtcagtacaaacgcgaccgtggcacgccagcgccaactccagcccaccacccaggcaagcgccatgaatagccgcgataacctgaatgggcaaagcatgaatctccgccatcaactgttggccctgccgcgccagagcttccgcttcttgcgccgttttgcagttgccgatcatgttgatgtctgcgccagcaatgaagttgtccggtttagcggagacaaacaccacgcctcgcaactctttgttttcacggagttgcttaataatggcgcgcacctggctggcaaactccgccttcagggtattcattttctcacccggtacgtcgatggtgataacggcaatgttgtccagacgaacattaagggtaaacgcacttgtcatttccattattccgcctccagaaccattgccgcgccaagcccaccggcagcacaggcggtaactaaaccaaatccaccgccgcgacggcgaagttcatgcaatgtctgggtaatcatccgcgcgccggtcgccgcgaagggatgcccgtaagcaatgctaccgccaagcacgttaaatttgctatcgtccacttcgccagtggcatgtgcacgccccagtgcttcacgagcaaaacgttcactacccagcaactgaatattcgccagcgtctgagctgcaaaggcttcgtgcatatcgatcaatgtcagatcgctcatcgtcaaaccggcacgctccagcgccagcggtgtactccaggctggaccgagcaacatgtcctgccagacatcaatcgcagtaaatgcgtagctgcgcagataccccagcggcaccagccctaattctttcgcccgggattcagtcatcaggatcaccgctgccgcgccatcggtcagcggcgtactgtttgccgccgttaccgttccgtgtttgcgatcaaacgccgggcgcagctttgcgtaatcggcaaggctggaattaccgcgaatattgttgtcttcgacaagcggttgtttataaggagggataaaggcagtcatcacctcttctttgagttttccgtcactccatgcctgagcggcacgctgatggctacggtgcgctaatgcatcttgctgttctcgggtgatgccgtaggttttcgccatttgctctgcggtgtcgcccatccgcaagccggtagaatattctgctaccgcaggtggtacgggcattaagtcgcgcaaacgcaggcgagagaagagtttcagtcgctggctcatggtacgagctttgttgacatcaaccagcacgcgcgccagttttttactgacgccaattggcaatacgctagaggaatctgccccaccggcaatccccgctcgaatagttcccgccatcaggctttctgcgacgtttgcaactgcctggaaactggtagcgcaagcgcggctgacgctgtaagcatcggtatgtacattcattcccgtaccgagaacaatttcacgcgcaatgttgggggcttcaggcatttgtacgacctgaccaaagaccagttgttcaatcacttcggcggggatctcgctgcgtgccagcagttcgcctaccaccatcttccctaaatcaaccgcgggaatgccatgaaaagccgtcgcctgacgggcaaaaggcgtacgtaaaccgctaacaatggcgatacgatcgccctggcgggtaaccagcggtaaaacctgacccataacactcccctgtaaaaaaataaataaagtggtctgacctgatcatagtcttaaccatttttttacatttagccaagtggagaaaagggaaagtgggagctatgacacagagagaaaagaagaagagaaaagaaaacgcccctgccagcaactgacaggggcgtacgtacccgagaggaattaacgcagacccagctggaaaatcagcatttcagcttcgcaggcaaaagtgaaatcgatatccaggcgcacaccgtcagactcttcagtgaaagtcggggtgattttgcaaggttcagattccacgctacgggctttttcagtcagcgccgccagcgtttgctctgcttctgcgcggtttgcaaacacgcggctgtaagacgcggtgcagtcggagttgtccataatggtgccaacatccatacagcagcaaaccggggtttcatcagcactacatttactcatcgttgatttcctctgtatgtgcacccaaggtgccagataaacgttgtggatattttacgcttccggaaagtgctgctccagttgttaattctgcaaaatcggataagtgaccgaaatcacacttaaaaatgatctaaaacaaaattcacccgaatccatgagtgcgccacctccaaattttgccagctggatcgcgtttcttagatcatatttgaaaaaagatagaaacatacttgcaacattccagctggtccgacctatactctcgccactggtctgatttctaagatgtacctcagaccctacacttcgcgctcctgttacagcacgtaacatagtttgtataaaaataaatcattgaggttatggtcatgagccagaaaaccctgtttacaaagtctgctctcgcagtcgcagtggcacttatctccacccaggcctggagcgcaggctttcagttaaacgaattttcttcctctggcctgggccgggcttatagtggggaaggcgcaattgccgatgatgcaggtaacgtcagccgtaaccccgcattgattactatgtttgaccgcccgacattttctgcgggtgcggtttatattgacccggatgtaaatatcagcggaacgtctccatctggtcgtagcctgaaagccgataacatcgcgcctacggcatgggttccgaacatgcactttgttgcaccgattaacgaccaatttggttggggcgcttctattacctctaactatggtctggctacagagtttaacgatacttatgcaggcggctctgtcgggggtacaaccgaccttgaaaccatgaacctgaacttaagcggtgcgtatcgcttaaataatgcatggagctttggtcttggtttcaacgccgtctacgctcgcgcgaaaattgaacgtttcgcaggcgatctggggcagttggttgctggccaaattatgcaatctcctgctggccaaactcagcaagggcaagcattggcagctaccgccaacggtattgacagtaataccaaaatcgctcatctgaacggtaaccagtggggctttggctggaacgccggaatcctgtatgaactggataaaaataaccgctatgcactgacctaccgttctgaagtgaaaattgacttcaaaggtaactacagcagcgatcttaatcgtgcgtttaataactacggtttgccaattcctaccgcgacaggtggcgcaacgcaaagcggttatctgacgctgaacctgcctgaaatgtgggaagtgagtggttataaccgtgttgatccacagtgggcgattcactatagcctggcttacaccagctggagtcagttccagcagctgaaagcgaccagtaccagtggcgacacgctgttccagaaacatgaaggctttaaagatgcttaccgcatcgcgttgggtaccacttattactacgatgataactggaccttccgtaccggtatcgcctttgatgacagcccagttcctgcacagaatcgttctatctccattccggaccaggaccgtttctggctgagtgcaggtacgacttacgcatttaataaagatgctagtgtcgacgttggtgtttcttatatgcacggtcagagcgtgaaaattaacgaaggcccataccagttcgagtctgaaggtaaagcctggctgttcggtactaactttaactacgcgttctgataacgcgttcgcctggataaagtcacctgcatagcaggtgactttaactcccccacttcaccgaaagtagtgtcctcattgcttacctcctgagttttgcaaacagcctgttggcagcttgccctttcaaatcaataagcggtatccacagacaaacctgaagggaaaggcatattttcaggcgttctgctcgtccttctcaaagagtttacttttctgcatttccaggatactcccccccccctggctattgtgcgctcatacactcaaattaaagataggttctaaataaatgagcgttttttgatagtctatttcattaggtaatatatatttgtaacaaatcaatcaaaatggaataaaatcatgctaccatctattagtatcaacaataccagcgcagcttacccagaatccatcaatgaaaataacaatgatgaagttaatggattagtacaagagttcaaaaacctttttaatggtaaggaaggaataagcacctgtattaaacatctacttgagcttataaaaaacgccatacgagtaaacgacgatccttatagatttaatattaataattccagtgttacttatattgatattgactccaatgatacagaccatattactattggtatcgacaaccaagaaccaatagaattacctgcgaactataaagacaaagaactcgtccgtactatcattaatgacaacatagttgagaagactcatgatatcaataacaaggaaatgatcttcagcgcattaaaagaaatatatgatggagatcctggttttatcttcgataagataagtcacaaactcagacatacggtaacggaatttgatgagagcgggaaaagcgaaccaacggacttatttacctggtacggtaaagataaaaaaggcgactctctcgctattgtaattaaaaataaaaacggaaatgattacttatctctcggttactacgatcaggacgactaccacattcaaagaggaattcgtattaatggtgatagtctcacccaatattgtagtgaaaacgccaggagtgctagtgcgtggtttgaaagcagtaaagctatcatggcagaaagttttgcaactggttccgatcatcaggttgtaaacgagctcaacggggaaagactgagagaaccaaacgacgtttttaaacgttatggtcgagcaataagatatgattttcaagtggacgatgcaaaatataaatgcgaccatctaaaagaaatagtttctactttagtcggtaacaaaattaacgttggccattctcaaaaaatatataagcattttaaggatctcgaaggtaaaattgaagaaaggcttcaaaatcgccaggctgaatatcaaaatgaaattaatcaaccatctgcgccaggtgttaattttgatgatatttaaaattatttttccagttttttgatttttcaacagctgaatatcggaaatagtcagtgacgaacatcagtatttttacataattacgtctaggtcattgtcggtttatctccttttacttgtggtaattgagggataacaacaaaaaaggtgagttttgcgactcaccttttttatttgtttcttattcagaatcaatatcttttaaatcatcctgaatcgcttgtgcgttcggattttcctgcggtttgagttcgccgccattagcgatgaaatcatgacgctggaagtacgcttcgcgcaccataatataaggatcggagctctgacgcagcagaccatcggaatccagcagctgagcgcgggtttcgatcccttcaagcgtccatttacccacagacatcggccaggtcagccaggaaagaaccgggtaaaaaccatccgccatatcaccaccgtcatcacgcagcgtgaagctaccgtagaacggtaactgaacgtaaggcccataacccacgccataatgaccaagcgtactaccgaagcggtgaggttcagtccgttgcagtttcgggttcgccatccctgcaacatcaataaaaccgcccatccccaaaatggtgttcaggaaaaagcgggtaaagtggaccatcccctgataagggtcgccctgcaagaagtagttaaccatcaccgcaggttcttcaaggttgccagtaaagttgctcaaaccgttacgcgccggttgcggaacataatcacgccaggcgacagcgaccggtcgaacaatatacgggtctaatacattgaagttgaagttgtacatggtgcggttgaacccttctaacgggtcagaacgcccttgctgatctgtaccggaactcgcacaccccaccagaagcgtagttcccagagcaagcgcgctcaggcgaagcttcataaatgtctccctgtttttttatggcttatgcagtttgccatccatgacggaacgataccgtatccgcctgtttaggtgtgggcgattgtaacagcacgtcaactgatgtccagacgccctgatttgctgatttgatcatagcctggtaatcgccgccctgtaggctacttgattctatagaaacagaaaaaggcaaacgcagccttttctacattttcagagtaactcccgtcagttgcgagcaaaaaagccgctacgctttagctatacgtgctaattcaagagaagagaccatggacaacgacaaaattgatcaacacagcgacgaaattgaagttgagagcgaagaaaaagagcgcggcaaaaaaatagaaatagatgaagaccgactcccctcccgggcgatggcaattcatgagcatatccgccaggatggtgaaaaagagctggaacgcgacgcaatggcgctactgtggagtgccattgcggcgggtctgagcatgggcgctagcttactggcaaaagggatatttcaagtcgaactggaaggtgtgccgggcagcttcttgctggagaatctcggttatacctttggttttattatcgtcattatggcccgccagcaattatttaccgaaaataccgtgactgcggtactacccgtcatgcaaaaaccgacaatgagcaacgtcggcttacttatacggttatggggcgtcgtgctgctgggtaatattctcgggacaggtattgcggcgtgggcatttgaatatatgcctatcttcaatgaagaaactcgcgatgcatttgtcaaaatcggcatggatgtgatgaagaacacccccagcgagatgtttgccaacgcgatcatttccggctggctgatcgccactatggtttggatgtttcctgcagcgggtgcggcaaagattgtggtgattatattgatgacctggcttattgccctgggtgacaccacccatatcgtggtcggttctgttgaaatcctctatctggtgtttaacggtacgctgcactggagcgatttcatctggcccttcgcactacctactttagcggggaacatctgcggcggcacctttatcttcgcgttaatgagtcatgcacagattcgtaacgacatgagcaataagcgtaaagcagaagcacgccaaaaagcagaacgtgcggaaaacattaagaaaaattataaaaacccggcataaatggcgagggtttaagcaatcgagcggcagcgtacttaccccgcactccattagcgggtatactcatgccgcattgtcctcttagttaaatggatataacgagcccctcctaagggctaattgcaggttcgattcctgcaggggacaccatttatcagttcgctcccatccgtaccagtccgcaaaatcccctgaatatcaagcattccgtagatttacagttcgtcatggttcgcttcagatcgttgacagccgcactccatgacgggtaaaaagtggataaaataattttacccaccggatttttaccctagagccatacagcctcacactcgatgaggcctgtcagtttcttaaaatatcctgatctaccatcgccgtcatagagcgtatttttattacctgatttgcaggttcgattccctattcggagatagcactcatgcaacacgaactacagcctgatagtctggttgatttgaaattcatcatggctgatactggctttggtaaaaccttcatctatgaccggattaagagtggcgacctgccaaaagccaaagttatccacgggcgagcaagatggttatatcgtgaccattgtgaattcaaaaataagctcttaagccgcgccaatgggtaaaatagcgggtaaaatatttctcacatctaaaaaacaccattccaatcaatcccctgctgcttcaagtagatgtctgcaggggacaccatccttgtgtttatccctaaaaccacataaaaaccgtaaattaaattcgaactagcaggccgaataaggcacaccaggaactcgtggttttattcattaactagtggtttttacctgttctcttagccagataataaacgcttcaatttttggccactgcctgcccggtaatgtggtgatgtaataatgctgatggcatttcaccgtcatatcgccaaacggcgcgacgagctcaccactggcaagccttttttgtaccaggcgttttcttcccatcgccaccccaatatgattcatcgcggcaataacagctaaatcagaacgatcaaagccaattccagaagatgtcggcaaattaaccgcataatgttgcgcccaactatgccattcatccgtaccggagtcgttgctccatgcctgtctgtcatggagcaacgtacagtgacacaggttaattaccgtgttggttaaagcatgtctttgagcgtattccgggctacatactggcaggatttcttcatccatcagaaagtgatgagtgagttgcgcactcggcgcatcatcaaagtagatcgccaaatcgattccggcacgttgcagattgacgttgtcattaccagtgagcacggtgaggctaatagacggataccggcgtgtaaagtcacctaatgcgggcaccaaccagcattgggcgatagagggccgggaatacagagttaacgttccgcttaactcctgatttttgatatcaagaatttcctggttcagggtatccaggctgctttttagcgcccaataaacacgtttcccctcgtgcgttaattccactttgcgatgggaacgaacaaacaactgaatgcccaattcttcttccagctgattgatacggtgacttaccgcactggggctcaggctcaattcctctgccgccagggcgaaggactgatgcctggcagccacttcaaaagtatgcattttacttaattgccagccgttaagcagccgatttcttatttcacgaaggggttccataatcacctcatttttcgcttaagtgtaaaaaaatagcggcaaaatttcagctatgagatgagctaaagtgaaccatatctcaattcaccttcatttttagatgtaaatcactccattgatgcaatttacctcatgtgaaaggcaaattttatcgtttgtcagcctgcgttgtttttttgtccaatatcatcaggttaatcacaggggaaggtgagatatgcactctcaaatctgggttgtgagcacgctgcttatcagcatcgtgttaattgtactgaccatcgtgaagttcaaattccacccgtttctggcgctgttgctggccagcttcttcgtgggaacgatgatgggcatggggccactggatatggtaaatgctattgaaagtggaattggcggaacgctggggttcctcgcagcggttatcggccttggcacgatactgggaaaaatgatggaagtatccggggccgcagaaagaattggtctgacacttcaacgctgccgctggcttagtgttgatgtcattatggtgctggttggcctgatttgtggcatcacgctgtttgttgaagtgggcgtcgtgctattgattcctctggcttttagtattgccaaaaaaaccaataccagtttattaaagcttgccattccgctatgtaccgcattgatggcagtgcactgcgtggttcctccacatccggctgctttatatgttgccaataagctgggcgcagatatcggtagcgtgatcgtctacggtttgctggttgggctgatggcaagtctgatcggtggcccacttttccttaaatttctgggtcaacgactgccctttaaacctgtacccacagagtttgcagatctcaaagttcgcgatgaaaaaacactaccgagtttaggcgcaacgttattcaccatactgctacccattgcgctgatgttggttaaaacgattgccgaattgaatatggcgcgtgagagtggtttgtatatcttggttgagtttattggcaaccctatcactgccatgtttatcgccgtgtttgtcgcctattatgtgttgggtatacgccagcatatgagcatggggacgatgctcacacatacggaaaatggcttcggttctattgctaatattttgctgattatcggggccggaggcgcattcaacgccattttaaaaagcagcagtctcgctgatacgctggcagttattctctccaatatgcatatgcacccgattcttctggcctggttagtggctcttattctgcatgcggcagtgggctccgctaccgtggcaatgatgggggcaacggcaattgttgcacccatgctgccgctgtatcccgacatcagcccggaaattattgcgattgctatcggtagtggtgcaattggctgcactatcgttacggacagccttttctggctagtgaagcaatattgcggcgctacgctcaatgaaacatttaaatactatacgacagcgacatttatcgctagtgtcgtcgctctggcgggcacattcctgctgagttttatcatctaagcgcaaagagacgtactatggaaaacgctaaaatgaacagcctcatcgcccagtatccgttggtaaaggatctggttgctcttaaagaaaccacctggtttaatcctggcacgaccagtttggctgaaggtttaccttatgttggcctgaccgaacaggatgttcaggacgcccatgcgcgcttatcccgttttgcaccctatctggcaaaagcatttcctgaaactgctgccactggggggattattgaaagtgaactggttgccattccagctatgcaaaaacggctggaaaaagaatatcagcaaccgatcagcgggcaactgttactgaaaaaagatagccatttgcccatttccggctccataaaagcacgcggcgggatttatgaagtcctggcacacgcagaaaaactggctctggaagcggggttgctgacgcttgatgatgactacagcaaactgctttctccggagtttaaacagttctttagccaatacagcattgctgtgggcagtaccggaaatctggggttaagtatcggcattatgagcgcccgcattggctttaaggtgacagttcatatgtctgctgatgcccgggcatggaaaaaagcgaaactgcgcagccatggcgttacggtcgtggaatatgagcaagattatggtgttgccgtcgaggaaggacgtaaagcagcgcagtctgacccgaactgtttctttattgatgacgaaaattcccgcacgttgttccttgggtattccgtcgctggccagcgtcttaaagcgcaatttgcccagcaaggccgtatcgtcgatgctgataaccctctgtttgtctatctgccgtgtggtgttggcggtggtcctggtggcgtcgcattcgggcttaaactggcgtttggcgatcatgttcactgcttttttgccgaaccaacgcactccccttgtatgttgttaggcgtccatacaggattacacgatcagatttctgttcaggatattggtatcgacaaccttaccgcagcggatggccttgcagttggtcgcgcaagtggctttgtcgggcgggcaatggagcgtctgctggatggcttctatacccttagcgatcaaaccatgtatgacatgcttggctggctggcgcaggaagaaggtattcgtcttgaacctagcgcactggcgggtatggccggacctcagcgcgtgtgtgcaagtgtaagttaccaacagatgcacggtttcagcgcagaacaactgcgtaataccactcatctggtgtgggcgacgggaggtggaatggtgccggaagaagagatgaatcaatatctggcaaaaggccgttaataacgtttcaacgcagcatcgcaatcctttccctgggtgagcgatgctgccgatggcgcagacttaagatccccggtcttacccgctataaccccctccttttatcatcacccaacgcctttcgctgtaaacggcggtttcgcaaaccaaaccaaaaccgtaagtaagataaaagcaatagccgccatacggaaaatctcatttgcagaaatagaaagactctgctgggttatttcattattaatttcattaagaactccactaaggctaccataatatttatccataatttgactgctactattaaacacggggttaaattgatcgatggttgctgtcaactgactatggtgtaagctttcgcgtcgtccccacagcgtcattgtcaagctcgtaccaacacttccactcaaggtacgaaaaaaattactcatactgctggcattggcaaatttattatctggcaagccactaaagctaatcgttgttaagggtaaaaagaaacaggcaacggcgaatccctgaaaaaactgcggcaaaatgatgcctgtaaaatcaatcgttggcataaatgtcacagaacgccagtaatagcaaaccgcatacatcaaaaaactaaatgtcactaacaaccgcatgtctattttgttgccataacgtcctatcaaaggactaattaatagtggcatgatgccgatgggcgcataagcaagtccggcccatatcgcattataccccatcgtttcctggagtaactgcggcataaggacgatcgctccagagtaaaataaatacgcgcatgtgatactcacaataccaatggtgaagttacgggacttaaacaaactgagatcaagaatcgggttctcactggtgctctcccaaatgactaaagagatcagagaaataacacttactactgttaatattattattgtactgctgttgaaccaatccagatcgcgccctttatcaagcataatttgcaagccaccaacaccgagcactaacagggtcagtcctggtagattcattttgaccggactagtctcagtttctcttcctttaagtaaggttaagcataatgtcaggacgataatccccatagggacattgattaaaaatatccaaccccagctaaagttatcacaaatataaccgcccaatatcggcccacatatcggagcgataatcacggtcatactccataatgccagagcaaatgttcttttttctggcggataattccttaataataaactctgactcagtggaattaacggccccgccattaacccctgaacgactctaaaaaatatcagcacatcaagattggtgcttaggctacacattaaactagacaggctaaaaaaagtgacactaagtaaaaataatcttaattcgcctattctttgtgccaacctgccagtaacagggatcgcaatggcatttgctacaccaaagctggtgataacccaggtgccttcgtctgtacttgctcccagaaagccagatattgtcggtattgcgacgttagaaatagtggaatccaacatttgcataaatgtcgctaaactcaatgcaatagtgacgcaccataacgtcccaccggttaatggtgccggagtacttttagtgattgccattaaagttgtccattatggctaataatgttgctaatttctttttctatcggactggtatcgataactaaagccttactggtataagccggcatggaggtcacggtactagccagctcaggcatctcggcaatgtcttcgttcttcgtatcaatagttgctgtcatgcttaaaccaatacgcaaggggtgttccatgagttcttttggatcaagagaaacttcaaccggtacacgctgaacgattttgatccagttccctgtcgcattttgtgcaggtaataaggagaacgcattgccggttcccatattgatccctgtcacccgaccatgaaacacaacattttcaccataaagatcgctgataatattgacgctttgaccaatccgtacatccgtgagttgtgtttctttaaagttggcattaacccacatttgacgtgccggtacgacagccattaagctttgtccggggctcactgtttcgccgacctgaacacttctctgggcaatatagccggtaaccggactcttaatatccgtacgtttaagcgccaaccaggcttctttagttgcatccgccgcttcaacgacttgtggctgacggtttaatggtgtgttcattactaaagctttattcgctttataagcctggatagcggcattcaatgccgctttgctacttattaacgtatctttggtatgctccagcgtttctttactaataaccccctgcttcgctaacggcactcgacggttataatcttctaaagattgttgatactgaatacgtgcactagcgacttcggcactgtattgtttatcctgtaagtatagtttattcgtttgccgaacaatatttgccagattatttttagctttattgagtgcgatagtggcatcagttttatccagactaactaaaatgtcaccttgtcgaacgtagttcgtatctttatgattaacgacagtgacactaccactgacttgtgcagaaattggatctgcattccccgtgacataggcgtcatctgtactaatcatgtcttctaattccatactccaataggcataggcaccactaaacgcaataaataaaactaccgccaataaagaaaagtattttcttctgttagaatgttttttattactattaatctgttccactattatctctcatttctcatagatgaaatttatgaattgaatgaaaagagcattcattcttcatatcaaacacagtgcatgtgttgcacattatcccaggaacgttggaggcctaatttaaatgaggtgcaaaaaaaacaacagaggactaaaccgtggcttttgcaatacaattcttacgcctgtaggattagtaagaagacttatagtgccaacttgaaactataaatcatcggtacaatccctgattttattgttgacatttcatttatgccgactatttatatggtatacttgtcgaattatcttaaaggaagctcagattttcttatttttattgagaaaatgagatgacgccttatgtctgtattactacagggagaagggagatgcttcattgcaaagggaataatctatgaacgcaataattattgatgaccatcctcttgctatcgcagcaattcgtaatttattgatcaaaaacgatattgaaatcttagcagagttgactgaaggcggaagtgccgttcagcgggtggaaacacttaagcctgatatcgtcatcattgatgtcgatatccccggagttaacggtatccaggtgttagaaacgctgaggaagcgccaatatagcggaattattattatcgtctccgctaaaaatgaccatttttacgggaaacattgtgctgatgctggcgctaatggtttcgtgagtaaaaaagaaggcatgaacaatatcattgcggctattgaagctgcaaaaaatggctactgctatttccccttctctctcaaccggtttgttggaagtttaacgtccgaccagcaaaaactcgactccttaagcaaacaagaaattagtgtcatgcggtatattcttgatggcaaggataataatgacattgctgaaaaaatgttcatcagcaacaaaactgtcagcacttataaaagtcgcctgatggaaaaattagaatgtaaaagtctgatggatctttacacattcgcacaacgtaacaaaatcggctaaccacatgaagtttttaccctatatttttcttctctgttgtggtctttggagcaccataagtttcgcagacgaagattacatcgaatatcgtggcatcagtagtaacaaccgtgtcacacttgatccactacgtctgagcaacaaggaattacgttggttagcgagcaaaaaaaatcttgtgattgcagtacataagtcccaaacggctacgttgttgcataccgatagccagcaacgggttcgtggtattaatgctgattatttaaatcttttaaaaagagcgttaaatatcaaattaacactccgggaatacgcagatcatcaaaaagcaatggacgcgcttgcagaaggtgaagtcgatatagtgttaagtcatttagttactagcccgcctcttaataatgacattgctgcaaccaaaccattgataattacctttccggcgctggtaaccacccttcacgacagtatgcgaccgcttaccagtccaaaaccagtaaatattgctcgggtagcaaattaccccccagacgaggtaattcatcaaagttttccaaaagcaacaattatctcttttacaaatttatatcaggcattagcatccgtcagtgctgggcacaatgattactttattggtagtaacatcattaccagcagtatgatttcccgctatttcactcactccttaaatgtagtgaaatattataacagcccgcgtcaatataattttttcttgaccagaaaagaatctgtcattcttaatgaagtactcaatagatttgttgatgctttaacaaatgaagttcgctatgaagtaagtcaaaattggcttgatacaggaaacctggcctttctgaacaaaccattagaactcactgaacatgaaaaacagtggattaagcagcatcccaatttaaaggtgctggaaaatccttacagccccccctattctatgacggatgaaaatggcagcgttcggggcgttatgggggacattcttaatattattaccttgcaaacaggtttaaatttttctccgatcaccgttagtcacaatatccatgctggaacacagcttagccccggaggatgggatataatacctggcgctatttatagtgaagatcgagaaaataatgttttatttgctgaagccttcataacaacgccttacgtttttgtcatgcaaaaagcgcctgacagtgaacaaacattaaaaaaaggaatgaaagttgccattccatattattatgagctgcatagccaattaaaagagatgtatccggaggttgaatggatacaggtcgataatgccagcgctgcatttcacaaggttaaggaaggtgaacttgatgctctggtcgcgacacagctaaatagccgttacatgatcgatcattactatcctaatgaactttatcattttcttattcctggcgttccgaatgcaagccttagcttcgcttttcctcgcggagaaccggaacttaaggatattattaataaagcactgaatgcaattcccccaagcgaagttctgcgcctgacggaaaaatggattaaaatgcccaatgtgaccattgacacatgggacctatatagcgagcaattttatattgttacgacattatccgttttattagttggcagtagccttttatggggattctacctgttacgcagtgttcgtcgtcgtaaagtcattcagggtgatttagaaaaccaaataagtttccgaaaagcactcagcgattccttaccgaatccaacttatgttgtaaactggcaaggtaatgtcattagtcataatagtgcttttgaacattatttcactgcggattactacaaaaatgcaatgttaccattagaaaacagtgacagtccctttaaagatgttttttctaatgcgcatgaagtcacagcagaaacgaaagaaaatcgaacaatatacacacaggtatttgaaattgataatggcatcgagaaaagatgcattaatcactggcatacattatgcaatcttcctgcaagtgacaatgcagtatatatttgtggttggcaagatattactgaaacgcgtgatctaattaatgcactcgaggtagaaaaaaataaagcgataaaggctaccgtagcaaaaagtcagtttctggcaacgatgagtcacgaaataagaacaccaataagctctattatgggcttcctggaacttctgagcggttctggtcttagcaaggagcaacgggtggaggcgattagtcttgcctacgccaccggacaaagtctcctcggcttaattggtgaaatccttgatgtcgacaaaattgaaagcggtaactatcaacttcaaccacaatgggtcgatatccctactttagtccagaacacttgtcactctttcggtgcgattgctgcaagcaaaagcatcgcattaagttgcagcagtacgtttcctgaacattacctggttaagatcgaccctcaggcgtttaagcaggtcttaagtaatttactgagtaatgctctcaaatttaccaccgagggggcagtaaaaattacgacctccctgggtcacattgatgacaaccacgctgttatcaaaatgacgattatggattctggaagtggattaagccaggaagaacaacaacaactgtttaaacgctacagccaaacaagtgcaggtcgtcagcaaacaggttctggtttaggcttaatgatctgcaaagaattaattaaaaatatgcagggcgatttgagtttagaaagtcatccaggcataggaacaacatttacgatcacaatcccggtagaaattagccagcaagtggcgactgtcgaggcaaaagcagaacaacccatcacactacctgaaaagttgagcatattaatcgcggatgatcatccgaccaacaggctattactcaaacgccagctaaatctattaggatatgatgttgatgaagccactgatggtgtgcaagcgctacacaaagtcagtatgcaacattatgatctgcttattactgacgttaatatgccgaatatggatggttttgagttgactcgcaaactccgtgagcaaaattcttccttacccatctgggggcttacagccaacgcacaggctaacgaacgtgaaaaagggttaagttgcggcatgaacttatgtttgttcaaaccgttgaccctggatgtactgaaaacacatttaagtcagttacaccaagttgcgcatattgcacctcagtatcgccaccttgatatcgaagccctgaaaaataatacggcgaacgatctacaactgatgcaggagattctcatgactttccagcatgaaacgcataaagatctacccgctgcgtttcaagcactagaagctggcgataacagaactttccatcagtgtattcatcgcatccacggtgcggctaacatcctgaatttgcaaaagttgattaatattagccatcagttagaaataacacctgttagtgatgacagtaagcctgaaattcttcagttgctgaactctgtaaaagaacacattgcagagctggaccaggagattgctgttttctgtcagaaaaatgactaaatagcggctcccacaatgttcaaatgtgggagctatttaccagcacatcttacatttaactactgaactcctggcgaatttgttccccatgctggtcgagcgttgccgctcccggcataacatgcgggtccgcgcagccgctgatttttatcggattacccggcatcattattcccccggcttcaatcaacatatttctcgcctgagtttgtggcaatttaatggcctcagccacacttaataacggcgcgacgggtacaccaacttcatgtattctggctaaccaaacttcagctgcctgcgtttttaacgtccgctcaatatattgtttaagaatagcctggttttgtacgcgtaaaatattgctgctaaatcggggatcattaaccagttccgtaagctccagtgcctggcataacgcagaaaaaagcttgtcattaccacaacaaatcgtaatcggcttatcctgagtattgaaaacatcaaaaggtgccatgtagggatggcgatttcccagacgttgtggactcttcccagttgcgatatatgccatcagaccatgctccagaaaactcagcgtggcatcaaacatcgctatatcgacatgcgcccctctctggctcttttcgcggccataaagtgcactcactattccgctgaataaatagacaccgccgcatagatccgcaagagatgtaccaacgcgcactggcggagcatcaggatatcctgtttccatcattatcccgctcattgcctgaatgatggtatcgtaggcaggagcatcttttagcggaccggtatgtccgaaaccactgctactagcatatatgaggcgcgggttgatttcttgaagcgtttcccaactaaaccccagtttttccattgtacctgggcgaaaattctcagctaatacatcagcttgtttgagcatatttataaatatacttttatcgtgatcattctttaaatcaagaaccacactctctttgccatgattaataaaactgtaatagagactctgtccatccacatagggaccaaatgtgcgggtatcatcaccatgacccggcggctcaactttaattacccttgcgcccatattacaaagaagttgagttccgaaaggtccattaaggacatgtgtcatatcgataactaataagccttcaaacggccctttgctttcattatttgtcatttgcttatgccttgaaaaaagccgaaggtgaaaagacacttcggcatttatgtaaaatcaataacatgattaattaactaaccagtcgactgacataaatccacaagggagccgtgacgacaaagcccagtacgctcacagccaaactcgctgtaccagtacgggtgtagacattaaaccggctggcaataatgattccggagaatgccggcggtaatgcgcctgccagtaccatcatctgcagatgttcgctgttcaaatgacatgccataccaacgagaagcagtgccagtggcatcagaatcagcttcaggaaggtgttataagcaatttcggcactgaactcgaatttatgtgcagccagagtcaaccccgcagcgaataccgctaccccactgttagccttcgcaatcagattaaaggttgggtcccatgctgccggaatttttaccccaaccaacaccaggatcgttgccagaacaggtgcccatactactggctcctttgccgcagaaattaatgcgctcagattactattcttcttaccatccgctccactagaaggattcagcaaatacagaccaataggaatagtaattgcgttaacaataatagaaataattgctaccactaaacctgtacttacggaatcaccataaataggatcgagaactgcaaaccccaggaatccaatggtaggactacctgcaattaatgcacatacagctgcttctgcatgggtacgtttaaaaaatttgtagcaaccgaaccaggagaaaaagaaacatccgacaataaccacaagacttacaagggtcagacgagtgtccgcaaaaatcatttccctgtttgcccgagtaatagatacaaatagagccgcaggaagcgcgtagtttaataccagtttattaaatgcccgagcttgatcttcactaaatgtttctcgtctgccgctaaaataacccaacagcatgattacgataataggcaataaatcgccaataaaaaatgttagcataatagtatttccgataagggtcccctcaccatcgcataatgagttggcaagaggagacgatgtcagtatttaattaccagcgacttgttttgggttaagtttggtaatatggccactttcagttcctgctgcagggtcgatgaccacattaataatggtcggtttgcggctctgaataccggtggttaaagcatgacgaagttcatctgtcgtggtgacgttatagccaacgccacgaaacgcatccattaatttgtcataccttgcatggtgcaacagatccgttggacttggtgcaccagcgccactgagatcaacaccgtctcctctgtagatgccgccattattaaaaataacgatcgtcaccggcaggttatatcgacaaatcgtttcaatttccatcccactgaaaccaaaagcactatcaccttcaatggcgacaaccggagaaccagaagtcacgctagcaccgatggcatagcccataccgatgcccatgacaccccaggtaccacaatccagacgacgacgtggtttatacatatcaataatatttcgtgcattatccagggtatttgcaccttcattaactaaataaatatcctggttctcgcgcaatacgtcgcgcacagcacttaatgcattaaagtaatttaatggttgagtatctgtacttaatttttcatgcattttttgtgcattttgctgcttgtggatatttaaaatatcgcgccataccagtggagtcgtaaatgtgttttgtttcagttctgccagcataccttgcatactggatgcaatatcaccaacgactggcacagcaatggggcggttgctgtcaatttcctgcggttcaatatccagttgaataaactgtgtatctgccgcccatccttttttaccgtgtgccaataaccaattcagtcgtgcaccaacaagcatgacaacgtcagcatttgccagggcaaagctacgcgcagctgccgcagaaagtggatgcgtatcttcaaggatccctttcgccatagacattggcaggaatggaatctgagcactttcaataaattcacgaagctgttcatcagcttgactatacgccgcgcctttgccaaggataattaatggccgttcagcttttgctaaaaggctaattgcgctagtgacactcttcgggcatggcaataatgctgggctcggattttcaactttaacaatcgtggttaacgcttcgtctttttccatcgtcgcggccaggacatttgctggcaaatcaagataaactccgccagggcgaccgcttacagagacccggatagcgcgtgccaatgcaatgccaagatcctgcggctgattaacgcgaaatgctgctttggcatacggttttgccgcattcatttggtccagctcttcataatcaccttgctgtaggtcgacgatcgcgcggtcgctggagccgctaatcatgatcatcggaaaaccatttaccgttgcgttggccaatgcggtcaaaccattgaggaatcctggcgcagaaactgtcaggcagatccccggtttttgggtaagaaaaccgcttgccgcagcggcatagcctgcgctctgctcatgacgaaaaccaatataacgaatgccttccgcctgggcatggcgtgccatatccgtcacaggaatacctacaacaccataaatagtgtcaatattattctgttttaatgcttcaacgatgatatgcataccatctgtcatttgaagttgatcactcatgattaataacctcgaaatttttataaattgggagccagaagcccccgttaatatcagatggcgtggttttgcttcattgcagcaatttcatcgtcgctataacccagctcctgcaatacagcagcggtatgttcacctaatagcggcgcagctttaatatccggcgtaaaggcagagaatttcattggacaaccaacggtcagatattttccacgcaacggttgttccacttcaacaacactgccactttggcgcaaagagggatcaagactaatttctttcatacttaaaaccggtgcacaaggaatatcaaactgagtcaaataggccaccgcttcatgtttatcaatagtgacagtgtatttttcgatttcagcaaaaatatcgaaaatatgtggctgtcgtgcatgggctgtactgtatgccggatcggtaatccattctggtttgccgatggctttacaggtgttttcccagttttgctcctgaatagtgaaataaatataggcgttaggatcggtttcccagcctttacatttcaggatccagccaggctgaccgccaccacctgcattaccaccgcggggaactgcatcaccaaatgtaccattcggatactgcgggtattcttccagatgacccaatttatcgagacgctgctggtcacgtaatttcacgcggcaaaggttcaatacggcatcctgcatactcatggtgactcgttgcccacgccccgttttttcgcgatgcagcaaagcagcaagtaaaccgatcagcaaatgcattccggtgttgctgtcacccaacgctgcagcgcttaccagcggcggaccatcccaaaaacccgtagtggatgccgcgccacccgctgcctgagcaacgttttcataggcttttacattcacataagggctacactcatcaaaccctttgatgctaccaaaaatcagacgtggattgatttcttgaatatgctcccaggtgaagcccatgtgatcaatggcccctggatgaaagttctcgactaagatatcagcttcgcggatcagcttttccattacctctttgccttccgctgttttggtatttaactcaatagaacgtttgttactgttaagcatggtgaagtaaagcgcatcgatatcaggaatatctcgcagctggtgacgcgttacgtcaccaacgccgggacgttcaattttaataacgtcagcgccaaaccaggccagcatttgagtacaagatgggccagattgcacaccggtgaaatcgagaactttaattccttgaagtggagtactcatagcaatacctattagttaattaaatatgtgttaatttagcgtttatttaaggcgtaatatcttctataaataacccgcaaaatatcgtcgtagctgcactcgatatttttaaaatcctgtatcaagtgctgaaaatcatttcatcgccacttccaattcctttctgcatggtaagtagtgaggacgaaaagaagaatatgataaatattgattcgtggtaatcagagagagtcgcgacatttgtgatgttattcttacaactgtaagaagcgccggtgatttacaagcaagggtatgattacgctttttaaagcgtaccataaaacataacataataaatgatttgtgatgacacgggattattgcggtttactttgaggaatataaaatgcgagtttatagcaccgcgagcgccaaataattttatgaccacaacctgtcgtattgtggtcataaaaaattgtcggctggagggagttaaatcctttacctcaatatactgcctgtcagcattagttcacaaacagtgcttcgctatcgacgatgattccatcttccgcacctttaagcgccaggtttgcctcgtagtattgctttttatcaagcagtttctgcgcatcagcaagtgcattacgagtctgtttaagtggcatcagatattggttttccattacgccaacaccggccaggcgaagctcttccattgcgccctttttatcccctttcgccattttttcattggcaatttttatcgcggcttctttttcgggagttgctacataactctcagaaattccgacagatgcattaatgacaatatattggtcatcattgagattggtctttttacctggcttagcgaactttgcccattcggtactgtcatcactcagcaaagcggaagcttcattggtcagttcttttgccttttctggatcgccatgaaacagagccaggcgcgctacctgcacgtcacgcatcgcatataaaccttgttcagagatacgctctgctgccgctgccgttttctgggtttgctgaacttgctgagtttgctgttgtgccgctaccggagcattatcagcagcccatacagtactagatgccagaattgctgtgaccatcgtggccataattaaacgtttcatacttacctcattctttaacagttttagaaaacgccgccatcatattgggtgagcatgaaatgagaaatcagagagcaacggtcattttgaaagggttatcttacagttgtagttattatcgcaagaagtattttagtcttacaattgtaggaatatgcttcctgtcgcagagaactattcttatataccacaaagagatgtcatttattatatcgatgtaaatactgattaattaaatgtaaatacagccataacatcgtaggttctcagtgaaccattttcaggataactttctatgaaagtaaacttaatacttttcagcttatttttattggtctctattatggcatgcaatgtttttgcattttccattagcggtggtggaagtgagaggagctataaagagactgaaaaaacaagtgcgatgacgaccacacactctacaaaacttcagccaagtcaggcgattttgtttaagatgagagaagatgcgccaccattaaacctcacagaagaaatgccgcccccttttccgacaaaggcgaattatcttattcatcctgtgcgataacgtctttcacatggcaggtgaacaatcatgtctgatgctgatgtgaacacctgcccaaatgagccatcctgacccattaccgcctgccataccccaccataaagcgaatcatcaagccacaagccggggcaagaaacataaatatccccgtcactagttcattaccgccagttaaccacatggtgaagtaataaatgagtgcagcgaggatcaccatgccgaagaaagaagagaccgcgcttaccacgttcagtacctgaccgatgtagccgcttacgcagacaatacacagggcgagaaacatccataaattaatcatagctcaacctcctgccgcgctaaaaaacctgtaacttcagtcactttaatagtaagacaatccttaacctctggcaatttttgctaagcatcaatgaaaacagcatgttaaatgcaagactgttgtgtacggaaaaatatttactttgcacgattaataatcagtagctgaaagcagtcagcgagtgataaagtacagataccgcattcatgctcctcgtggttatgtcctgactagtctttacactctttacaggaaccattgtcgtacatgatggcccaaccaattgagtgtaccgctgtcgacatggaatcttctgcgatacaacaattcgtatctacagaaggtaactatgtttccacaatgcaaattttcccgcgagtttctacatcctcgctactggctcacatggtttgggcttggtgtactctggctttgggtacagcttccttatcctgttctctgctttctcggcacgcgtattggcgcaatggcgcgaccattcctgaaacgtcgtgaatctatcgcccgtaaaaacctggaactttgtttcccgcagcattctgcggaagaacgcgagaagatgattgccgaaaactttcgtagtctcggcatggcgctggtagaaaccggcatggcatggttctggcccgacagtcgcgtacgtaaatggtttgatgttgaagggttggataaccttaaacgcgcacaaatgcaaaatcgcggcgtaatggttgtcggcgtccattttatgagcctggaactgggcggccgcgtgatgggactgtgccaaccaatgatggctacctatcgtccacataataatcagctgatggaatgggtgcagacccgtgggcgcatgcgctctaacaaagcgatgatcggcagaaataatctgcgcggcattgtcggtgcactgaagaaaggtgaagcggtatggtttgctcccgatcaggattatggtcgtaaaggcagctccttcgcgccgttctttgcggtggaaaatgtcgccacaaccaatggcacctatgttctctcccgtctctctggcgcagccatgttgaccgtaacgatggtaagaaaagcggattacagcggatatcgtttgttcatcaccccagagatggaaggctacccgacagatgaaaatcaagccgctgcctatatgaacaagattatcgagaaagagatcatgcgcgcaccggagcagtacctctggatccaccgtcgctttaaaacgcgcccggtgggagaaagcagcttgtacatttaacaaactgctcttactctttccctcctcaaatcggccataataacctcatggtttttatggcttttttcttaaggttttttccttcgctgaatatctaattattaccgtcagaaattaaactgtcgccgatatgagacacttgtaagttactaaaagtaaataagaaaatgcctcttgtctcgtttcagttttaggcgtacattagcgccgtctcgagcagtttagctcagaattctggggtgatgcccacggtaaaatacagggcttttaaggtcgctttgcccggtgtcaactcactgtatcaggtgtaatgaagtcattcaggcgtaacagtaattacgcggagagatgtaaagtgaaatatttctttatgggcatttcttttatggtcatcgtttgggccggtacttttgccctgatgatctaaaagcaaactgtgcaatgaaaaacaggagccatcaggctcctgtttgcatttctgacgacggtgtttattccgcgttttcgtgaatatgtttgctgctggcgggtagtaaaccgtcggcacggaacatcgctttaatccctctgatggcctgacgaatacggtcgcggttttcaatcagtgcaaagcgaacatgcgtatcaccatagtcgccaaagccaatccccgggctgacacaaaccttcgcttcgttaaggagcttcttggcaaattccaggcttcccatggccgcatatggttccgggattttcgcccagacatacatgctagccttcggcatttcaaccatccagcccgcttcatgcagccctttaaccaatacatcacggcggcgtttgtactgttcggcaatgtcgcgcacgcactgttgatcgccctccagcgccgcaatcgccgccacctgcaacggcgtaaaggtgccgtaatcgtgatagcttttaatacgagccagggcgctgaccagcgttttgttgccaaccataaagccgatacgccagcccgccatgttgtagcttttgctcagcgtaaagaactcgactgccacatcgcgtgcacccggtacctgcataatactcggcgctttccagccatcgtagacgatatcggcataggccaggtcatggaccaccagcacatcgtagcgtttcgccagcgccactactttttcgaagaactccagttccacgcattgcgcggttgggttactcgggaagccgaggatcatcatcttcggtttcggataactttcacgaatggctcgctccagttcgttgaagaaatcgacaccttccaccagcggcacactgcgtacctgcgccccggcaatcaccgcgccataaatatggatcgggtaacttggattcggcaccagcaccgtgtcaccatgatccagcgtcgccagcatcagatgcgccaggccctctttgctaccaatagtgacgatggcttcactttccgggtcgatttcaacgtcgtagcgatcctgataccagcgggaaatggcgcgacgtaaccgcggaatgccgcgactagtggagtaaccatgcgtgtccgggcgctgggccacagtacataatttttcgacgatatgcggcggagtcgcaccgtccgggttacccatgctgaaatcgataatatcttcgccgcgccgacgcgcagccattttcagttcagcggtgatgttaaaaacgtagggcgggagacgatcaatgcgcgtaaagcgacgttcagggcgagtgtcagccataatttcctcagattaacgttagcgcccggaccgtccgagcgacgctgccacgatggtggctgttttgaaaatagcctgattaatttctgtctgtccagtgttttagaacattttatcaatgacgttaaatgaggaactctgctttaaaaacaggaaatttatctgcgctaacaagaaaattaccactcattctattaacataataatttcaataaatttactaaccagaagtgcattatcaagagatgcattgctaatacaccatttatctatcaatccccttttaaaattgtggtttttcctcaaaaacggcctgctggtcatcagccttcaggttacctatcatagaggtttaatccttattcagagtcacccgtgcacgaaatattcaacatgctgctggcggtcttcgatcgggcagcgttaatgcttatctgcctgttctttctcatccgtatccgcctgtttcgcgaactgttgcacaagagcgcgcactccccaaaagaattgctcgccgttaccgccattttcagcctgttcgccctgttcagcacctggtccggcgttcccgtagaaggcagcctggtgaacgtacgtattatcgcggtgatgtccggcgggattctgtttggcccgtgggtaggcatcattaccggcgtgattgcgggtattcaccggtatttaattgatatcggcggcgtgacggcgatcccctgctttatcaccagcattctggcgggttgtataagcggctggatcaacctgaaaatccccaaagcacagcgctggcgcgtcggtattctcggcggcatgttgtgtgagacgttgaccatgattctggtaattgtctgggcaccaactaccgcgttggggatcgatatcgtctctaaaatcggcattccaatgatcctcggtagcgtctgtatcggctttattgtgcttctggtgcaaagcgttgagggcgaaaaagaggccagcgccgcgcggcaggccaagctggcgctggatatcgccaacaaaacgctaccgctgtttcgccatgtcaatagcgagagtttacgcaaggtctgcgaaattatccgcgatgacattcacgccgatgcggtggcgattactaataccgatcatgtgctggcctatgttggcgtgggtgaacataactatcagaatggcgatgacttcattagcccgactacccgtcaggcgatgaattacggaaaaatcatcattaaaaacaatgatgaagcccaccgcacaccagagattcattccatgctggtgatcccattgtgggagaaaggggtcgtgaccggaacgctgaaaatttactactgccacgcgcatcagatcaccagcagtttacaggaaatggcggtcggtctgagccaaatcatctccacgcaactggaggttagtcgcgccgagcagctacgtgaaatggcaaataaggcagagcttcgcgccctgcaaagcaaaattaatccccattttctgtttaacgctctgaacgctattagtagcagtatccgtctgaatccggataccgctcgccagttgatctttaatctgagccgttatctgcgctataacattgaattaaaagacgatgagcaaatcgatatcaaaaaagagctgtatcaaattaaagactatattgccattgagcaggcccgctttggtgacaagctgacggttatctatgatattgatgaagaggtgaattgctgcattcccagcctgctgatccagccgttggtggagaacgccattgtccacggtattcagccttgcaaaggtaaaggcgttgtcaccatcagcgttgcagagtgcggaaatcgggtacgcattgcggtgcgagataccgggcacggcatcgatccaaaggtgattgagcgggtcgaagcgaatgaaatgccgggcaataaaattggcctgctgaatgtccatcatcgcgtgaagttattgtatggcgaggggctgcatatccgccgcctggagccggggacggaaattgcgttttacattcctaaccaacgcaccccagtcgccagtcaggctacgttattgctttgagccggagtgatattgtgaaagtcatcattgttgaagacgaattcctggcacaacaggaactgagctggctaattaaagagcacagccagatggagattgtcggcacctttgacgacggtctggacgtgttgaagtttttgcagcataaccgcgtcgacgccatttttctggatatcaatattccgagcctggatggcgtgttgctggcgcaaaacatcagccagttcgcccataaaccgtttattgtgttcatcaccgcgtggaaagaacatgcggtagaagcgtttgaactggaggcgtttgactacattctcaaaccgtatcaggagagtcgtattaccgggatgctgcaaaaactggaagcggcctggcaacaacagcagaccagcagtacgcctgccgcgacggtaacgcgtgagaatgacaccattaatctggtgaaagatgagcgaataatcgtcacgccaattaacgatatctattacgccgaagcgcacgagaaaatgacctttgtctatacgcggcgtgaatcctacgtaatgccgatgaacattaccgaattttgcagcaaactgccgccgagccattttttccgctgccatcgcagtttttgtgtcaatctgaacaaaatacgcgaaatcgaaccgtggtttaataacacctacattctgcgactgaaagatctggattttgaagtgccggtcagccgcagcaaagtgaaagaatttcgccagttaatgcatctttaatcgggaactttcatgaaagcaccaggcttgcccgccgatcaacaatttttcgccgatctgttcagcggcctggtgcttaacccgcaactactggggcgcgtctggtttgccagccagcctgccagcttgccggtgggcagtttatgtattgattttccccgtctggatatcgtgctgcgcggcgaatacggcaatctgctggaagcaaagcagcaacgtttggtggaaggagaaatgctgtttattccggcgcgcgcggctaatttaccggtcaacaacaaaccggtgatgctgttaagcctggtgttcgctccgacctggcttgggttaagcttttacgatagccgcaccacgagcttgttgcatcctgctcgccagatccagcttcccagcctgcaacgcggtgaaggtgaagcgatgcttaccgccctcacccatcttagccgtagcccgctggagcaaaatatcattcagccgctggtgttaagtttgctgcatctttgccgtagcgtggtgaatatgccgccgggcaatagccagccgcgcggcgattttctctatcacagcatttgtaactgggttcaggataattatgcccagccgctcacccgcgagagcgtggcgcagttttttaatatcacgcccaatcatctgagtaaactgtttgctcagcatggaacgatgcgttttatcgagtatgtgcgttgggtgcgaatggcgaaggcgaggatgattttgcagaaatatcatctgagtattcatgaagtggcacagcgttgcggttttccggatagcgactatttttgtcgcgttttccggcgtcagtttggtctgacgccgggagagtacagcgcccgttttcagggctaacgtcagaaggttaattctgtttccagcagcgtcaggatactttgtgcatcttgcgcggcaaacaagctctggcggaagtttttattcaccagtttacgcgccagctggctgaagactttcacatgattcatcccttcgttagcacccagcgtcagcatgatcaccagttcgacttcgcccatttcactctgccagccaatcggtttcgccagccgggcaatgctgatactggaatgacggatccactgagatttggtgtgcgggatcgctacgccaaaaccaacgccggtggtaacaatctcttcccgctgccagacatcttcttccagctcaaacggatgttcagtgcgcccgttaacgccgaggttgccgcacaggaactggatcgcctgctctttattgctaaaatcctgatcaacaaagatattctccagcgccagcagtgggcgaacgtcttcttccggcgtaaaggcggtgagtaacgcttcaatttcctgcgcactgcggcattcacatgcctgacgcgccagttcccgacacgcctcgctatccagttgacgaagctggcttttcaccgccggaatacgcgggctactcatactcagctcatccaggcccagcccaagcagtagcggcagataacggctttcaccgcccagttcaccgcaaatgcctacccatttgccccgctgatgcgcagtggtaactatttgctgcaacatgcgcaggaagcttggcgtaatcgggttatatagcgggcttacgcgcgggttattacgatcgaccgcatacagatactgggtcatatcgttggagccgatactgaagaaatcgacctcatcgcagaagtggtcgatgatgtagcacacgctcggaacttccaccatgatcccaagcgtaatcgtctctgcatgacgcaggccatcgcgcttaagctcaacgatcgctttttggatctcgcctttcacccataagatctgatcgaggctgtgaaccatcgggatcatcaactgggcgttgccgaaactggcggcgcgcaaaatggcccgcagttgagtgcggaacaggccagcaaattccgggtaaatacgtaccgcgcgatagccgaggaacgggttctcttcctggggaatattcagataaggaatgcttttatcgccgccgatgtccatcgtgcggaagataatcggcttgtcgcccgccgccagtagcacctgctggtaggcttcaaattgctcctgctcgtccggcgcgctgtcgcgatccatatagagcatttcggtacggaacagcccgacaccttccgcgccgttggcaaacgcgcctggcgcttccagagcggtgccgatattcgccgcaatatcaatacgcttgttatcacgggaataggccagctgcgcggcagcctgcgcctgttgtttttggcgtttatccgccagcgtctgcgcgacctgataataaccgctcaccgcgtcattcgggttaatcgccagcacgccgcactgggcgtcaagcactgcaggttgcccggcataacgggcaatcgcatccagcggcaagccactcagtaccgggatcgcgctggcacgggccagaatcagtgtatggctggtgcgcccggttttctccagaatcatgcccgcaagatttttcaaatcaaggctcaaaaactggcttggggttaaatcttcagccaccagaatggtcggtttttcaagcaccagcttgttgcgcggcttcagttccggccaggtgatatgcagcaactgttcgctgatatcgcgaatgtcgctaacacgttcgcgcagataatcgctggcagaggcagaaagtttggcgcaaacctgctccatattgctgatgatcgccgcccccagcccctgatgctgttctgtcatcaggcgacggatattgcctgcaaattcatcatcctgaatcaggctcaaatgggcgctgaggatagttttgctttcgccgtcacgctcacgcaattgctggttcagttgctcggcaagcgttgccaggctgtgctccagccgggtggaatcttgcgcactggcggggattgcccgataactgtcgaggctgtcgctttgtaacagggtcagcgtacccacgccgacgccgcttgccagcacattgccgtacagtaaatccgggttaaggcggcttaaactacgcggcagcggatgcgccgtcagttctgcctgcgtaggctgaacgctgtcgctgtcgataaagcgcacctggatgtactcttccagcacgcgccgcgcctgctcttcatcgctgccgctaatgttcaggctgcaactgtcattaaatagggtgccggtgccaatcagcgccaggctgcttttcgcatctgcctttgcgttctggcgatggttaataaaagtgatttcgctttgccactggctgcactgttctttaagttcccacgccggacgagcatgtagaccgttaggcaaaggacagagaaattgaatcgttaacataaccgctccgggttaatcaggagatcatctgaaatccgtcagttgaacaaccgtctcacgcgtaagacgttgaataagggcagataaaagttgctgcatctgcaaaatgtcgcggcaatcggcaatgcttgcggcgcaatgtccatggcgggttgctggccccatcaccactgtgggcacgccggtgccggttaagtgcaccgccccgccgtccgtgccgccgttgctgaacatatctgcctgcaacggcacgccaatttctgccgccacggtttcgacccaggcggtaagttttggcggcgcaatcaggctcttgtcgcttaacaccagcatcggcccgttaccaatctggcgatggttagccgcgccataatcaaagtttttcgcccagcaggcggtatcaagcacaatggcgacgtccgggctcaccgcgcgggtggcagtttgcccgccgcgtaatcccacctcttcgctggaacttgccaccagccacacttccgcaggtagttcggcgtcgtgcagttcgcgcagtaacgtcaccagcagatagcaaccgaggcggtcatcaaaggctttccccatcactcgctggtgagggagaacctgaaaagtggtatcaaacgtgacgcgatcgccgggacgaattcccgcctgcatcacttcgtcataggagcgcgcaccaatgtccacgcgcatggcgctgacgtcattcccctgccggtcgccgtcaagcaggcctggaattttgcactcttcacgggtggtgatgcgcaccggctgcagctggcgggcagccatgcgtacgttgccaaccggcagcacatcaatcgccccttcgcgggagatgctgcgcaccataaatcccacttcgtccatatgcgcacagatcatcaccttcggacctgtgctttcattcaggcggatcagcacgcttcccagaccatcaaatcgcacttctttttgcaggcgatccgcttcttccagcaggatctgccgcacttcctgttcgctggaggcgatcgcatctgcctcgctcaacgcttttaataggcttaaatccattatgcctctcccgtgagcaacactgttttcggcatggcgtagagcacttctgcgccttgcggggtaaccagcacaacatcttcgatgcgcacgcccccttgccctggcaaataaatccccggctccacggtcagtaacatgcctggctgtagcgtcgtggtgtcccgcggactaaaacgcggatcttcatgaacttcaatgccgatagcgtgaccggtgttatgaccgaaatagtcgccataacctgcttctgtaatgacccggcgcgcggcatcgtcaacctgctggcagcgcacgccggggcgaatcgcggagattgctgcgagctgtgcctgcaggacaatttgatagacgttaaacagcaggtgagattcggcgctcaccccttcgccattcaccagcaaggtgcgcgtcatatcagagcagtagccctgatacagcgcaccgaaatcgagagtgacaaactcgcccgctgcaacaatcttgtcgctggctttgccgtgcggcagcgccccacgccagccactggcgacaatggtgtcaaaagaggctttttctgcgccctgctggcgcataaaccactccagttcagcggctatctcgcgctcgctcatccccgcctgaataaagcggcgaatatgctctgcaccgcgatcagcaatcccacaggcgaggcggattttctccacctcctctggcgttttgatttgccgcagcacatccggcgtggcgctaaccagtttcgcattgagttcagactgccagcggtgcgcggtttcccaactcacctgctggccctcaaaaccgagcgtttgcaactgttcatcggcaatgatttgattgacgatagtggtaagcgtgttcgtcgcgtcaagcaaatgcagctggtagccttgcgcacgggcttccacctcaacgtaatagcggctatccaccagaatgtgcgcactttcacggctaatcaccacataaccacttccggtggagatccccagatgcggctgtttgttctgccgactggagagaagcactgcatccagttgttgcgccttaagccagtcgcgcaggctagcgagtaatgtcatctggattttccttcttacaggctatcgattaacaatttgcctttacggaacatcatcagacgcaggaacaccaccatcagcgcagttatgactgcccccagcgcgatccccgccatatagacgcccaggttagtgaccagcggccatgcccagatagcggactccgggaaccattgcactgcgcccagccagacagcggcggtactgccgacaatagcgccgaccatatagctcggaatggcggtgatagggctttccagcgcaaacggaatcgcaccctcactgatccccataaacgccaggaacatggcggtcttaccctgcggataaagttgagcgttgaacaggcgtttgccggttaaacgacggtcgataatggtcgccagccccagaccaatcggcggaataacgatagcgatagaacgagcggtgaccggtaatacgtggtcagtggtaaagctgaaggcaacaaaacctgcggctttgttgatcgggccaccaaggtcgattgctgtcgccgcggcgatccccattgcgtacatcagcgcgcccttctcacctgcggcagtcagcacagtacggataccgccgttgatccagccaccaaagggggtgatgacgtagtacatcgccagcatgacaaaaatggcggaaagaatcgggagcaaaaatgtggttttgaacgctaacaggaaatccggtaactggattttctggttcatccacttcacaaggtaaccggcaacgatagaaataatcagcgcaccaatgaaggtggacggcaccgggctagaggtcgcccattgcatagtgctgggatcgaagttcagcagttgcgtcggctgggtagacatcaacccgccgataaaaccagccgggaacgccagtttgccaccgatagagttcgccacaaaagcagcaaacatcggaatggcaaaaccaaacaacacgccgccgaaggactggctcagccaggcaaatttaagtaaggagaggtcgaaaccggagaatttcccgctattaagagcatccatgatgccgatctcagcaggaattttaagccagctataagcaatcagctggctgaaagcgaggatcacaccgcccataattaaggtcggcaccatgcgactaatcccactcatcacatgctgcgggagttcaccccagaagctggttttagaggcctgcggattcttaactgccgctgccgcaccggatgcgccaggcacaacggttgcactgcgttttttaatggccataacaattatccctgtcgaatattactgttgttcagaggcaatcatctcttcgatttctttgatgatgcccgcagcgtttttaattgcgtcctgcaaagtgatttcataaacgtcgcgactttcgaaacgttcgttatcttccggggtaactgccacggagtggatgatgatggtcgcttcggcgatatcctgcgccgtcaggcgattctggataccgtccgcgccctgggtttcaattttcacttcataaccggcttctaccgccgcttcttccagcgcctgagcggccataaaggtgtgagccaggcccatcgggcaggcacataaggcaatcagtttcttactcatcgttaattcctcgttcagtgatagttgacgagtgaaattatgaacgtgcaaaacaaatcgccgttaccagacaaataatgcatttactggagaattaatcccgctgtacggaagtgtgacgcaggtcgaccttgtgaggggacacaaagaaaaattgaataaactgtatgatttaaaagattatcgggagagttacctcccgatataaaaggaaggatttacagaatgtgacctaaggtctggcgtaaatgtgcaccggaaccgagaaggcccggattgtcatggacgatgagatacaccggaatatcatggacatattctttaaagcgccctttatcttcaaatgcggcacggaaaccggaggctttgaagaactcaaggaagcgcggcacgataccgcccgcaataaacacgccgccaaatgtcccgagattgagcgccagattgccgccaaaacggcccataatgacgcaaaacaggctcaatgcgcggcggcaatcggtgcagctgtcagccagcgcgcgttcggtaatatcttttggcttgagattttctggcaggcggttgtcagctttcacaattgcgcgatacaaattcaccagcccagggccagaaagcacgcgctccgcgctaacatgaccaatttccgcacgcaatatttcgaggataatggcctcttcttcactattcggcgcaaaatcaacgtgaccgccttcgcctggcaagcttacccaacgcttatcgacatggaccagatgcgcaaccccaagccccgttccggcaccgtaaaccgcaataggcttaccttcgaccggttctgcgccaccaaactgaatcagatgctcttttttcagcatcgggatcgccatgcttacagcggtaaaatcgttaataatttccagatggctaaaaccgagattctttttcatttcggcaatactgaacgcccaggtatggttggtcatcgccacccagtcaccggtaattgggcaagcgatggcaatacagccgtctttcacctcgaccttatgttcttcaagataaacgcgaatgaccgcttcgaggctggggtaatcaagcccactataggtcttagcctggctgatttcaccactggcaatatcacacagagcaagacgtgcgttggtgccgcccacatcaccgactaatgcatactttgtcattcttcaactgctccgctaaagtcaaaataattctttctcacactgtaaatacctgggggcataacaacaacgccggaaaggcaggctccctgtaaatatcgatctgggtcacacaattactttatcgtttcagcaccaattgcagcgatgcctttttgcaagctgggcaaactaagtatctgaccccgcataaggaatagaacacaggcggcactaacccggacgtagactgtattacaaaagcggcaaaaagcagagacaaaaaacccccgctttgcagcgagggttggaaatttggtggagctaagcgggatcgaaccgctgacctcttgcatgccatgcaagcgctctcccagctgagctatagccccacgatgcgtttacgtaccaagtttgctgggtgcaaaatttggtggagctaagcgggatcgaaccgctgacctcttgcatgccatgcaagcgctctcccagctgagctatagccccgtcacgtaaagcttgtcgagttgacgggcggcatcatatgaattccgcccgaatgtgtcaacggcaaattgcaacgtgtagtttcaatcgctgaaaaatcaggcaaatgaacaattttggaaaaccgctcgcattcagtagttattcatgtcacggtttcctgtaaagtggtgttataaaatgaactactaatagacccacatacattcagggaattgttatgttcaaggagaggatgacaccagatgaacttgccagactgaccggctatagccgccagaccattaataaatgggtacgcaaggaaggctggacaacgagtccaaaacctggcgtccagggtggcaaagcccgactggttcacgtcaatgaacaggttcgtgaatatattcgcaatgctgaacgtccagaaggtcagggagaagcgcctgccctttctggtgatgcgccgcttgaagtattgctggtgacactggcgaaagagatgacgccagttgaacaaaaacagtttacatccttgcttctgcgggaagggattatcggattgttacaacgcttagggattcgcgatagcaaataatatgaaaagattacgcaataaaatgaccaccgaagaactggctgaatgcctcggtgtggctaaacaaactgttaaccgttggatcagagaaaaaggctggaaaacggaaaaatttcccggcgtgaaaggcggtcgtgccagacttattctggtcgatacgcaagtttgcgagtttattcagaacacgccagccttccataacacaccaatgttgatggaagctgaagagagaattgctgaatacgctcctggagcacgcgccccggcgtatcgacaaatcatcaacgcgatagataatatgacagacattgagcaggaaaaagtcgcgcaatttttgagtcgtgaaggaattcgcaatttcctcgcccgtctcgatattgacgaaagtgcataaataaaaaacggcaggatattatctcctgccgtttatctttttacacgctaattactgctgattttcgcgttcagcaataaaatccagcgctttgttgatacgctcgatactgcgggtcttaccaattgcgtgaacggtaacatccagtgctggagactgccccgcaccggttacggcgacacgcagcggcataccaactttacccatacccacttccagctcatccgccgtcgcctgaatagcgtgatgaacgttttcagcggtccagtcagtaatcgcggccagtttgtcacgaaccacttccagcggctgacgcgctaccggacgcagatgttttttcgcggcgtcggcatcgaactcagcaaaatcttcgtagaaataacggcagctctgtgccatctctttcagcgtcttgcagcgttcgcccagcagtttcaccagatcagccagctgcgggccgttacgggtatcgatattttcctgctcaatgtgccactgtaagtgagtagcaacatactccggcggcagcgcgttaatgtagtgatggttcagccacagcagcttgtcggtgttgaacgcactggcagatttgctgacggcattcaaagtgaagtatttgatcatctcttcacgagtgaagatttcctgatcgccgtgggaccagcccagacgcaccagatagttcagcagtgcttctggcaaataaccgtcatcacgatactgcattacgctgactgccccgtgacgtttggacagttttttaccgtcatcgccattgatcatagaaacgtgcgcgtaaaccggcaccggcgctttcagggccttaagaatgttgatctggcgtggcgtgttgttgatatggtcttcgccacggataacgtgggtgatttccatatcccagtcatcgacaaccacacagaagttataggttggggaaccatcggtacggcggataataagatcgtccagttcctggttgctgaactcgatcggaccacggatctgatcgtcaaaaacaacagaaccttcctgcgggttagcaaaacgtacaacacacggttcatcatcagcatgatgctcatggctgtggcggcagcgaccgtcataacgcggcttctcacctttcgccatttgctcttcgcgcagcgcttccaggcgctctttagagcaatagcatttataagcagtgccctcttccagcatctgatcgatcaccgcgttgtagcgatcaaaacgtttggtctggtagtacggaccttcatcccactccaggctcagccagttcatgccatccataatggcttcgatagcttccggcgtggaacgctcaagatcggtgtcttcaatacgcagcacgaactcaccgccgtggttacgtgcaaaaagccaggagtaaagagcagtacgcgcgccgccaacgtgcagatagcctgttgggcttggcgcgaagcgagttttgattttcatgaaatggccttacgtttagaaagatgccgacaaccggcaaatcctggaaaaattaagtgggcgatattctatcactcccgcctgattcctcaatgtagttcgggtttctaccttacgcattattgttttcgttgacaaattgcgcaacacggtctgttttgcgatcatcttgcttaaatttacgacgaacgaacaatttctttagaaaatgcgttgactcattttgaactctccctataatgcgactccacacagcgggggtgattagctcagctgggagagcacctcccttacaaggagggggtcggcggttcgatcccgtcatcacccaccaactactttatgtagtctccgccgtgtagcaagaaattgagaagtgggtgattagctcagctgggagagcacctcccttacaaggagggggtcggcggttcgatcccgtcatcacccaccactttctcgccagctaaatttcttgtaaaaatgtgaagtaccgaagtgggtgattagctcagctgggagagcacctcccttacaaggagggggtcggcggttcgatcccgtcatcacccaccacttcgggtcgttagctcagttggtagagcagttgacttttaatcaattggtcgcaggttcgaatcctgcacgacccaccaatgtaaaaaagcgccctaaaggcgcttttttactatctgcgatactcaaagattcgaacctgcagcaggtttgagttgagcgcagcgaaacaacggagccgctcgtgctggcgacggcccgaagggcgagcgaagcgagtcatcctgcacgacccaccaatgtaaaaaagcgccctaaaggcgcttttttgctatctgcgatttgcgaaattgcctgatgcgcttcacttagcagactactatttccggcaattcctgtctcctcacttactgtgtcaatgcagccaacagcttaaccatcgcgggcgtcacctgctgtgtttcataaacaatatataaatctgcagggatgcgctgtttgagcggacggaaaatgacacctggccagttcatttgtgcgtagctgtccgctatcaatgtgataccaatgcccatactgaccatagcgagtaccgtttgcggttcattaacttcgcgaataacaaccggactaaatcccacctgctggcaaactcgctgcaaaaaatcccagtcagtgtaaacgggcggcattgtaacaaaatactcgtcacgtagcgcttccagcgggacggtggaaaaactactgagatgatgctcttcaggcatcgccaccagaaacgcgctttcatgcaaccgtaagctggtaaaaccagtcggtggttctgtcgccattcgccagatcccggcatcaagttcgcggcgttccagcaaggccatttgcatcgcgggcatcttttcgcgaaaaagaacgtcaacgttaggattttccctgaggaatcgccgcataaccgggcgcatccgtccccacattgccgttcccactacgccgagttcaatccgccctgcttctccccgacctatttgttcaatccgagccaatacattattagcattcaccagcaatcgacggctttcttccatcaagattttgcccgcgtgtgtcagtacgacgctgcggctatggcgaataaaaagctgcgtgccgagttgattttccagctctttaatatgaatgctgagcggaggctgagacatatttaaacgcgctgctgcgcggccaaaatgcaactcttccgctacggcaagaaaataacggagcaacttaagatctgttctgtatacgcgttccataattaagtgctccatataataaatacatcgtattaaattatcatggcataaagtatttcaccaccagatatccgacatacataaacacaatggataatatacccggtaatacatttggtacaggaataggcaagcgcacgattgtaaacaaagcaccaataccaaaaccaacgccggaagaaaataaaatatctttcactaattaacctttatcataaaagcagctctgaagagcagagccgcgaatccttttaatgagtcaccgctcgatgctttatcttttcagggtcatgattatatttaaacccaaagaaaaatatcactgcgagaaaaagagcatatcctgcaaacaccagccagatagtttgccagtcttttacgccatccacgctaaagtaatctactgccatgccactcagaatgctgccaacccatgcgccgacaccatttaccatggtcataaagagcccctgcgcgctggcacgaatgctggaatcaacttcctgttcgacaaatacgctaccagaaatattgaagaaatcgaatgcacagccataaacaatcatgctcagcagcagcaaaataaatccggttgtactcggatcgccataggcgaagaagccaaagcgcagcgtccaggccaccatactcatcagcatgacggttttaatgccaaatcgctttaaaaagaatgggatagtcagtataaagcccacttctgccatctgactaacactcagtaaaatggagggatatttcaccacaaaactgtcagcaaactccgggttacgggcgaaatcatgtaggaacggattaccaaaaacgttggtaatttgcagtaccgcacccagcatcatggcaaagaggaaaaagatggccatgcgtggatttttaaacagcacgaaggcatccagacccagcttgctggcaaggcttgtggtcgcttttttctccgcaaccggaatcttcggcaaagtcagcgcataagcgctcagcagcaaactcgcaccggacgcgatatacagctgcagactactcaattccagatgcagcaggcttactgcccacatcgcgacaatgaaccccaccgtaccaaaaacgcgaatgggcgggaaagcggtcaccgggtcaagccctgcctgggcaagacaggaataagagacgctgttgcttaacgcaatagtcggcataaacgccatcgcattgactaacatcacccaaaacatcatatccggatcagttacggatgccgcataaaaaagtacgcccgcacacaccaggtgacacagcatgtatgcacgttctgcgcgcagccatttgtctgcgatgatccccattataccaggcataataatcgcggcgatccctttggaactgtaaaccatgccaacattagcgccggtgaaatgaagagtattaatcatgtaagagccgagggtaaccagccagctcccccagataaaatattgcaaaaaggacattacctttaagcgcatcgcgatgctcataatcgtttccttgtcgcatcatttggcctcacccgcgaggccgtttcttattgtttttctcaggcaattttgcgcagaaagccacaaataaggttgatgaagttctgcttagagagctccgcagccgccagcgtttgcgcatgactcaatttcacatcgcttaaaccttccgccatattggtaatcgcagagaccgcaacgactttaaggtcgcaatggcgagcactaataacctcaggcaccacagacataccaacaacatccccaccaataatttgcatcatgcgaatttccgccgcagtctcgaaattcggccccggatagctgacgaacacgccctccgtcagagggaaaccctcctctttcgccactttttgtaacagtgcgcggtattccgcatcgtaggcatttgccagactgaagaagcgctctccaaaacgatcatcgttaagacccaccatcggcgtaccgggcatggtgttgatatgatctttcaatgcgaccaggctgcctgcccccacttccggacgcaggctgcctgccgcattggtgcagaacagtagctcgcagcccagcagcttaaaggtacgaattgcgtcagtcataatggtcattccacgaccttcgtagaaatgtccgcgacctttcatacataccaccggtacgccctggagatggcccagcactaactcccccgcatgaccatgtaccgtacttaccgggaagcccggcagcttttcgtaggaaattgcgacagcgttctcaatctgatcggccagcgcgccgagcccggaacctaaaataaaggccactcgtggcgtgaaatcaggtttataagtcttgataatatctatgcaaaacagcgggttatgagaaaattgaacctgagacatacatatcctttttctgtagggtggaatctaacgcctttttatagcgaggttgtcccggctcttaccaatacacttttctcacgcattcaatagcgattcgatatcgatggatttatatcttttttctattaatccacggtaaaaactgtattggcgatattaattcctttgcattaacaatatgtcgtttttagcaaaccactttattaagcaatctactaataacgatcggcatagggaattatgctatgaaaaaacatcttttaactctgacactttcctctatattagcgatacctgttgtatctcatgcagaatttaaaggcggttttgcagatatcggcgtgcattatctggactggaccagccggactaccgaaaaaagcagcaccaaaagtcacaaagatgattttggttatcttgaatttgaaggtggcgctaactttagttggggagaaatgtacgggttcttcgactgggaaaacttctataacggtcgccataataaaccaggtagcgagcagcgttatacctttaaaaataccaaccgtatttacctgggtgacaccggatttaatctctacttgcatgcgtatggcacctacggttctgcgaatcgcgtgaatttccacgacgatatgttcctgtacggtatcggctacaatttcaccggcagcggttggtggttcaaaccgttctttgctaagcgttatacagatcaaacctattacactggcgacaacggctatgtcgccggctgggttgcaggttacaactttatgctgggcagcgagaaattcactcttaccaactggaacgagtacgagtttgaccgtgacgctacctatgcagcgggtaatggcggtaaagaagggctgaatggcgcagttgcactgtggtggaatgcaacaagtcacattactacggggattcagtatcgatatgcggatgacaaactgggcgaagatttttaccaggatgcgataatctactccatcaaatttaacttctgattgattactgccggggctcccggcagtatgaattcactttatatctgatacaacggatccccttcccgcccagccattagcgcattgccctggtctcgtaccacgtcccataaagcttcagcggcggtggaaagactacggttcttcctgcgcaccagcatcaactggcgttcaacaaccggcgtaatgcgctttaccaccagtgggctaccttcaggcaatggtagcgccagtgcgggaagaatactgatgccgatgcctgcggctaccatcgggaacagcgtcgccggatgtccaatctcctgcacaatattcgcctgaataccattgcgcgccagcgctgcgtcaatcagcggtcggctgccactcgcgtaatcctgcaacaccaatttcgctccctgtaatgcctgccagggtacataatcttccacggccaaagcgctatcgcgatggcaaagcagaaagaaaggctcggaaagaatcgcttcacattgcagatcgcccactgggcctggatcgatgacgatgccaaaatcgacatctccctggcgaatactttccattacccactgctgcggacgatcgtgcaggacaaactgaatatctggatagcggcgatggctttcagcaatgcattgcggaataagatgcgcggaaatggtctggctggcagcgacccgaacttttccgctcagttgttgccccatacgcccggtatcgcgcaacgtgctgttcagttcatccagcagtcgctcaagacgcaaagccagctgctgccctgcatctgtaagcaccacttcacgcgtggttctgtccagcaggcgaacaccagtatgattttccagttccttcacactgtgactcactgcgctctggctcaggccgatacgctctcctgcacgactaaaacttttctcctgcgctactgtgacgaaaacctttaattgttttaaagaataattcatctgttttcttcatgaatggatgcaataaatcaattttatttctcaaactggaagaagcacaatagaaccatcgatcatctggagtctttatgaaactttttcgtatcctcgatcctttcaccttaaccctgatcacggtggtgttgctggcctctttctttccggccagaggcgatttcgtccccttctttgaaaatctgaccaccgcagctattgccctgctgttctttatgcacggcgcgaagttgagccgtgaggcgattattgctggcggtggtcactggcgactgcatttgtgggtaatgtgcagcaccttcgtgctgtttccgattctgggtgtactgtttgcctggtggaaaccggtaaatgtcgacccgatgctctactccggttttctctacttgtgcattctcccggctaccgtgcagtctgcaatcgccttcacgagtatggcgggcggtaacgtcgcggcagcggtttgttctgcgagcgcatccagcctgctggggattttccttagtccattgctggttggtctggtgatgaatgttcacggtgcagggggcagccttgagcaggtcggtaaaattatgctgcaactgctgctgccgtttgtgttggggcatctttcccggccgtggattggtgactgggtgagccgcaataaaaaatggattgcgaaaactgaccagacgtccattctgttggtggtttatacagcgttcagcgaagccgtcgttaatggtatctggcataaagttggctggggaagtttgctgtttatcgtggtggtcagctgcgttcttctggctatcgtgattgtagttaacgtctttatggcacgccgactgagcttcaataaggcagatgaaattactatcgtcttttgtggtagcaaaaagagtctggcaaatggcatcccgatggcaaacattctgttccccacaagcgtgatcggtatgatggtgctgcccctgatgattttccatcagatccaattgatggtctgtgcggtgctggcgcgtcgatacaaacgccagaccgaacagttacaggcgcagcaggaaagcagcgccgataaagcttaaagcggacgcttcaggggctggaccagttgcgtcagcccctcggttttaatcagcagcgtgatttgcattagctcaccgagcttccctgccgggaactcatctttgcgggcaaaccacagcagatactcctccggcaggtcgattaagcgacgccctttgtatttgccaaacggcattatcgtattggctatttcaatcagctgctctttttccatctcagctacccagcaaacgcagcatttccgcttcgtcgatgacttcaatgcccagttcctgcgccttcgccagtttagatcctgcagcttcacccgctatcaccagatcggttttcttgctcacgctgcccgcgactttcgcgcccagttcgaccagtcgagctttagcgtcatcacggctcatctggcttaagctgcccgtaagcaccacggttttaccagcaaacgggctgtcaatctcttccgcgttgataacgatcggcgcaggccagtgaacaccttccgccaacagctcgctgatgacattgcggttgctttcttcggcaaagaagttgtgaacgtgggatgcaacgacaatgccaacatcaggcaccttttgcagctcttcaatgctagcggcttccagcgcttccagcgtgccgaaatatgccgccagacctgctgcggtggcctcgccgacttcacggatgccaagtgcatagaggaagcgagcaaaggtggtttctttcgctttttccagcgcgttaaccacgttttgtgcgctttttggccccatacgctccagtccggtcagtttgcctgcggtgagtttgaacagatctgccggagtatggacatattctttttcaaccagctgatcgatgattttgtcgcccattccgtcaacatccatcgcacggcgggaaacaaagtgtttcaggctctctttacgctgcgcaccgcaaatcaggccaccggtacagcgggcaaccgcttcaccttccacacgctcaacgtcagaaccacataccggacaatgcgtcgggaatacaacctcacgggtatcttccgggcgttcagaaagcacgacgttaaccacctgcgggatcacgtcgccagcgcggcgaatcaccactttatcgccaatgcgtaaaccaagacgttcgatttcatccgcattgtgtaaggttgcgttactcaccagcacgcctgcaacatggacaggttccagacgcgcaacaggcgtaatcgcgccagtacgcccaacctgaaactcgacgtcacgcacaaaggtcatctgctcctgcgccgggaatttaaacgctaccgcccagcgcggggcacgcgcgacaaagccaagctgctcctgctgtgccagactgttgaccttaatcaccacgccgtcgatatcaaagcccagcgtcgggcggtcttcttccactttgtgatagaacgccagcacttcttccgcgctttcacaaagcgttacccgatcgctgaccggcaacccccactttttaaattgcagtaaacggccaagatgagtatccggcagctcgccaccttccagaacaccaacgccatagcagaaaaaagtgagcggtcgcttcgctgtaatacgcggatcaagctgacgcagactaccagctgccgcattacgtgggttagcaaacactttcccgcccgtgcgtcgcgcatcttcgttaatcttttcgaaccccgcctgcggcaggaacacttcaccacgcacttccagacgcgccgggatattctctccgtgcagcttcagcggaatggcgcgaatagtacgcacattagacgtgatatcttccccggtggtgccatcgccacgggtcgcggcactgactaaaacgccattttcatacagaatactgacggcaagaccatccagcttcagctcacagcaccaggtgactttctcgttgtttttcagacggtcctgcacacgtttgttgaaagcaagaaagctttcttcatcaaaaacgttatccagactcagcattggtacttcatggcgtatctggctgaaagccgccagcggcgcagcgcctacacgttgagtagggctatcaggcgtaatcagttctggatgtttggtttccagctcgcgcagttcgcgcatcagcctgtcgtattcagcgtcgggaatttccggcgcatccatcacatgataaagatattcatgatggcgaagcgtcgttcgcagttctgtcagttgttgttcgatactttccatatcgcaccatcaatgctaaaaacccccgacaagcgggggttcgaagaggagttaatttgccttaagtgtatcaggcgttggcgtctttgacttcgcggatgatgtcctggtactcgcgcaatttctgcggagtcatcatacggcgctgatcgtcaagcacgacaccgcccacttcatcggcaatatgctgcgcagattgcagcatcagcttgaagttctgcagctcgtcaccgtaagacggtacctgcataaagatagtgacacccggagtagtgaaatccttcatttcaggatcaaaggttcccggtttcaccatattcgccaggctgaataacgccgggccgctgccatccgggctaagatgacgatggtaaatattcatatcgccaaaaatgaagcccgcttgttgaatgctgttaagaagcagttcaccgtttagctcgctaccgtgatgcgccgcgacgttcatgataatcaccgcttctttgcgcttcggtttatccataactggagcaggttccgctacaggctcaggctgtggtgccgctacgggttctgcaggctggaaagcctgttgtgccggttgcggtgcactatgcacaggctgcggcgctggcgcgacctgtgggctaactggctgctgcaacggctgttcaggctgcggctgataggcaggctgctgcaccggctgcgctggatgcggagcatgttgcggcggtacctgcgcttcaggcggctgctggaccggttgacgcggctgcgcagacgcataaggcggttggtactggtgttgcgggctcggacgagcagcctcatgctcctgagcgttagccggggcatgattcacgcggtgaacacgaacctcaccaacgccctcatcatcttcgacatcctcgtcataagaatcgtcgtcacgtttactcttcattcgttttaatggccgatcgcggaacatagaagatcgttctttacggctggtccagaaaccatgtaccagtaaagcgattatggcgatcgcgccaacaatgattaatatcagacgcaaatcctgcatcattatattctctgttgttctaacaccttgccaccacggcaaacatttactcactaagagtatttgccgattacctcaagtgcaagtgcactattaactttcacagcacaaagatagatgaaatcgtgctttttgctgttttttcgaacatatcctaactgtccattgcgcaattacccggtaaaatacgcagaattttcctgggattggtcaaaaggagctcatcctgattatggttagtagtttcacatctgccccacgcagcggtttttactattttgcgcaaggctggaagctcgtcagccaacctgggattcggcgtttcgttattttaccgctgctggtcaatattttgttgatggggggcgcattctggtggctctttacacagctcgatgtctggatcccgactctcatgagttacgttccggactggctacaatggctgagttatctgttgtggcctctggctgtcatctctgtgctgttagtgtttggctatttcttctccacgattgctaactggattgccgctccgtttaacggtttattggctgaacaactggaagcacgattgactggcgctacaccgccagataccgggattttcggtatcatgaaagatgtgccgcgaatcatgaaacgcgaatggcaaaaatttgcctggtatctgccgcgcgcaattgtattactaattctttacttcatccctggtattgggcaaaccgtcgcgccggtactgtggttcctgtttagcgcctggatgttagccatccagtattgcgattaccccttcgataaccacaaagtgccgtttaaagagatgcgcaccgccctgcgcacacgcaaaatcaccaatatgcagtttggtgctttaaccagcctgtttacgatgatcccgctgcttaatctgttcatcatgcccgttgccgtttgtggcgcgacggcgatgtgggtcgattgctatcgcgataaacacgcgatgtggcggtaacaatctaccggttattttgtaaaccgtttgtgtgaaacaggggtggcttatgccgccccttattccatcttgcatgtcattatttcccttctgtatatagatatgctaaatccttacttccgcatattctctgagcgggtatgctacctgttgtatcccaatttcatacagttaaggacaggccatgagtaagatttttgaagataacagcctgactatcggtcacacgccgctggttcgcctgaatcgcatcggtaacggacgcattctggcgaaggtggaatctcgtaaccccagcttcagcgttaagtgccgtatcggtgccaacatgatttgggatgccgaaaagcgcggcgtgctgaaaccaggcgttgaactggttgaaccgaccagcggtaataccgggattgcactggcctatgtagctgccgctcgcggttacaaactcaccctgaccatgccagaaaccatgagtattgaacgccgcaagctgctgaaagcgttaggtgcaaacctggtgctgacggaaggtgctaaaggcatgaaaggcgcaatccaaaaagcagaagaaattgtcgccagcaatccagagaaatacctgctgctgcaacaattcagcaatccggcaaaccctgaaattcacgaaaagaccaccggtccggagatatgggaagataccgacggtcaggttgatgtatttattgctggcgttgggactggcggtacgctgactggcgtcagccgctacattaaaggcaccaaaggcaagaccgatcttatctctgtcgccgttgagccaaccgattctccagttatcgcccaggcgctggcaggtgaagagattaaacctggcccgcataaaattcagggtattggcgctggttttatcccggctaacctcgatctcaagctggtcgataaagtcattggcatcaccaatgaagaagcgatttctaccgcgcgtcgtctgatggaagaagaaggtattcttgcaggtatctcttctggagcagctgttgccgcggcgttgaaactacaagaagatgaaagctttaccaacaagaatattgtggttattctaccaagtagcggtgagcgttatttaagcaccgcattgtttgccgatctcttcactgagaaagaattgcaacagtaatgccagcttgttaaaaatgcgtaaaaaagcacctttttaggtgcttttttgtggcctgcttcaaactttcgcccctcctggcattgattcagcctgtcggaactggtatttaaccagactaattattttgatgcgcgaaattaatcgttacaggaaaagccaaagctgaatcgattttatgatttggttcaattcttcctttagcggcataatgtttaatgacgtacgaaacgtcagcggtcaacacccgccagcaatggactgtattgcgctcttcgtgcgtcgcgtctgttaaaaactggcgctaacaatacaggctaaagtcgaaccgccaggctagactttagttccacaacactaaacctataagttggggaaatacaatgttccagcaagaagttaccattaccgctccgaacggtctgcacacccgccctgctgcccagtttgtaaaagaagctaagggcttcacttctgaaattactgtgacttccaacggcaaaagcgccagcgcgaaaagcctgtttaaactgcagactctgggcctgactcaaggtaccgttgtgactatctccgcagaaggcgaagacgagcagaaagcggttgaacatctggttaaactgatggcggaactcgagtaatttcccgggttcttttaaaaatcagtcacaagtaaggtagggttatgattagtggcattttagcatccccgggtatcgctttcggtaaagctctgcttctgaaagaagacgaaattgtcattgaccggaaaaaaatttctgccgaccaggttgatcaggaagttgaacgttttctgagcggtcgtgccaaggcaagtgcccagctggaaacgatcaaaacgaaagctggtgaaacgttcggtgaagaaaaagaagccatctttgaagggcatattatgctgctcgaagatgaggagctggagcaggaaatcatagccctgattaaagataagcacatgacagctgacgcagctgctcatgaagttatcgaaggtcaggcttctgccctggaagagctggatgatgaatacctgaaagaacgtgcggctgacgtacgtgatatcggtaagcgcctgctgcgcaacatcctgggcctgaagattatcgacctgagcgccattcaggatgaagtcattctggttgccgctgacctgacgccgtccgaaaccgcacagctgaacctgaagaaggtgctgggtttcatcaccgacgcgggtggccgtacttcccacacctctatcatggcgcgttctctggaactacctgctatcgtgggtaccggtagcgtcacctctcaggtgaaaaatgacgactatctgattctggatgccgtaaataatcaggtttacgtcaatccaaccaacgaagttattgataaaatgcgcgctgttcaggagcaagtggcttctgaaaaagcagagcttgctaaactgaaagatctgccagctattacgctggacggtcaccaggtagaagtatgcgctaacattggtacggttcgtgacgttgaaggtgcagagcgtaacggcgctgaaggcgttggtctgtatcgtactgagttcctgttcatggaccgcgacgcactgcccactgaagaagaacagtttgctgcttacaaagcagtggctgaagcgtgtggcagccaagcggttatcgttcgtaccatggacatcggcggcgacaaagagctgccatacatgaacttcccgaaagaagagaacccgttcctcggctggcgcgctatccgtatcgcgatggatcgtagagagatcctgcgcgatcagctccgcgctatcctgcgtgccagcgctttcggtaaattgcgcattatgttcccgatgatcatctctgttgaagaagtgcgtgcactgcgcaaagagatcgaaatctacaaacaggaactgcgcgacgaaggtaaagcgtttgacgagagtattgaaatcggcgtaatggtggaaacaccggctgccgcaacaattgcacgtcatttagccaaagaagttgatttctttagtatcggcaccaatgatttaacgcagtacactctggcagttgaccgtggtaatgatatgattagtcacctttaccagccaatgagtccgtccgtgctgaacttgatcaagcaagttattgatgcttctcatgctgaaggcaaatggactggcatgtgtggtgagcttgctggcgatgaacgtgctacacttctgttgctggggatgggtctggacgaattctctatgagcgccatttctatcccgcgcattaagaagattatccgtaacacgaacttcgaagatgcgaaggtgttagcagagcaggctcttgctcaaccgacaacggacgagttaatgacgctggttaacaagttcattgaagaaaaaacaatctgctaatccacgagatgcggcccaatttactgcttaggagaagatcatgggtttgttcgataaactgaaatctctggtttccgacgacaagaaggataccggaactattgagatcattgctccgctctctggcgagatcgtcaatatcgaagacgtgccggatgtcgtttttgcggaaaaaatcgttggtgatggtattgctatcaaaccaacgggtaacaaaatggtcgcgccagtagacggcaccattggtaaaatctttgaaaccaaccacgcattctctatcgaatctgatagcggcgttgaactgttcgtccacttcggtatcgacaccgttgaactgaaaggcgaaggcttcaagcgtattgctgaagaaggtcagcgcgtgaaagttggcgatactgtcattgaatttgatctgccgctgctggaagagaaagccaagtctaccctgactccggttgttatctccaacatggacgaaatcaaagaactgatcaaactgtccggtagcgtaaccgtgggtgaaaccccggttatccgcatcaagaagtaattcttgccgcagtgaaaaatggcgcccatcggcgccatttttttatgcttccgccagcggcggcaaaatcaattcatcgctctcatgctgctgggtgtagcgcatcacttccagtacgcgcaaccccgctcggtgcactgcatcggttaacgccttccctttcagcaagccactgatgagctgagcacaaaacaggtcgccagtccctttcaggtcggtttttacccgactatgggaaatgacattcacgctgtcggcagtgaccaccacaacctgcatctcctgattttcttcattaccggaggcgctggtaaccaccacccattttaatgtgtcactaagcagactttttgcggcagcaatggcactgtcgagatcgcggcaatttttaccggtcaggatttccaactcaaagatattgggggtaattccctgcgccagcggcagtaaatattgtcgatacgcttcgggaaggtcaggtttgacataaattccgctatcaatatcgtcaatcaccggatcgaccatgatcaataggtcaggatggtctttgcgtagcgcagtcagccactcggcaaggattttgatttggcttgccgttcccatatagcccgtggttacagcacgaagttggcgcagcgcatcacgctcctgaagcgcacgcaaatagccgctaaaccattcgtccggaatcgcaccaccgtagaaagtgtcataatgcggcgtattgctcagcaataccgtcggcacggcaaagacattcaggccgttctgtttgatagcaggcacggcaatgctgttgcccacgctgccgtaaaccacctggctctgcacggcgacgatatccgcctgcagtgccctactcttatcgttaaacaacaacaaactactcatttaattttttctccttgccgatgatcctcatcgtaatccaaccgaaactttacctgattctggcagtcaaatcggctatcacaaaacaaggataaggtaattcaatgaagaaaatcatttgtctggtcattacactactaatgacactccccgtttacgcgaagttaactgcccatgaagaagcccgcatcaacgccatgctggagggattagcacagaaaaaggatttgatatttgtgcgcaacggtgatgaacatacctgctatgaagcggtttctcatctgcgtctgaagctcggcaatacccgtaaccgcattgacactgccgagcagtttattgataaggttgctagcagcagtagcattactgggaagccgtatattgtgaagatccccggtaagagcgatgagaacgcacagccttttttacatgcgttaattgcgcagacggataaaacggtgcctgcggaaggaaattaatccgctttgggaaggcatttacaggaggtaacatgaaaaaacgctttatttatcacgatgaaaaaagcaataaattttggtggatagattacgaaggggatagtttagctgtcaactatggcaaggtaggtagtattggtaaattccagacaaaagagttcgataatgaagaacagtgtctgaaagaagccagtaaattgattgccgcaaaaatgaagaaaggctatcaagaagatccaaagtttaacttcatggatcgctactattttgatgatgaagaaattgggttacatgttaaaacgagtcacccaaacttccagtgccattttactgatccactttatatgtgttgctgggatgaagaatctccttttggcagcgatgaaggtgctgatgctctaaacgttcttgaaaatagcctccgtaaagagccggatctggactgtgctgatttccctcaaatgttaattgaaactatgtggggtatgaaatacatcgctatggacagtattcttgaagaggatgttcgtgcgcaattactagtcgatgaaatgagcactatccagagcaatatgattacctacgcaactgcattcggtcagattaaagtcatgggtaaaatctcccataaacttaaaaagatgggactcaatgcactagcgcgtcatcagcttaccgcaaaaattcttcaatggggtgacggtcaggacagtccaatacttcaaaaaatgattgatgaccttacggcgtttcctcacgaaaattaaatactgcatttgtcggcagcaacaactgttaaaaaagtgcgctttgtttatgccggatgcggcgtaaacgccttatccggcctacaaaatcgtgctaattcaatatattgcagaaaccttgtaggcctgataagcgtagcgcatcaggcagttttgcgtttgtcatcagtctccgatgctattaatccttaaatccccgccccctggctaaaatgctcttccccaaacaccccggtagaaaggtagcgatcgccacgatcgcagatgatcgccaccaccaccgcgtcagggttagcttttgccacccgcagtgctccggcaaccgcgccgccggagctgacgccacagaatattccttcccgcaccgccagttcgcgcatggtgttttccgcatcgcgctgatgaatatccagcacctcatccaccagagaagcgttgaaaatccccggcagatattccgtaggccagcggcgaatgccgggaatgctgctgccctcttccggttgcaggccgacaatggtcaccggtttggattgttcgcgcataaagcgactgacgccggtgatagtgccggtcgtccccatgctggagacaaaatgagtgatgcgcccgccggtttgctgccagatttccggcccagtggtggtgtaatgcgcataagggttatcgggattattgaactgatcgagcagctttccttcgccacgattcgccatctccagcgccagatcgcgcgcaccttccatgccctgctctttggtgacaagaatcagttccgcaccataagcacgcatcgccgcacggcgttcctggctcatgttgtcgggcatcagcaatttcatgcgatagcctttcagcgcggcaatcattgccagcgcaatgccggtgttaccactggtggcttcgattaagacatcacccggtttaatttccccgcgcttttccgcctcgacgatcatgctaagtgccgcacgatctttcacgctacctgccgggttattgccttccagttttaaccacacttcactgccgttatccggccccattcgctgcaacttcaccagaggcgtattgcctattgtttgttctaatgtactcacgatctctatccatacgtggtgttgcctgatgcgacgcttgcgcgtcttatcaggtctacaggttacaaaccttgccattaaaaagcccggatcgcgggaagcgcctccgggcgtttaacattcactcaacctatcaggcgctttgtgcgagagcaagttcctcatcgcgggtttcgatacgctcgtcgccgttatacagccgcgcatgttgcagaccaacgaataaacgctcgccacgctgcggggcatcgtcgccatgcatcacgaccgtcagcggttcgttgtaccaccccagcggctgcaccactaattgggtgtagtgacctttcgggctggcttccagtacctgtaccggcagcgggctatcgaggctggtacggcggctgatatccacttcccaagggcgcaggaagagatccaccggcccctgatacgcaggtgtgtagcccagcggccagcgatgcgcgccaacatggaactgcccgccgcgaatggttccctgcaggcggttcacttcgcccataaattcgagcacaaaacggatcgccggttcgcgccatacctgatccggcgcgtcagcctgttcaatattgccctggctcatcacaactacacgatcagctacttcggtcgcttcttcctgatcgtgggtcacaaaaacgctggtgaattttagttcttcatggagttgacgcagccagcgacgcagctctttacgcacctgcgcatccagcgcgccaaacggttcatcaagcagcagaatttgcggttccacagccagcgcgcgcgccagcgccacgcgctgtttctggccgccggaaagctgcgccggataacgatccgccagatgggcaagctggaccatttccagcaattttgtcactttcgctttgatggctgcggcattcgggcgctcgcgacgcggcagcaccgtcaggccaaaagcgatattgtcgaacaccgtcatatggcggaacagcgcgtaatgctggaacacgaaaccgactttacgatcacgtgcgtgcaggcggctcacgtcggtgccgtggaagcgaatatgcccgctggtttgatgctccagcccggcgataatgcgcagcagcgtggttttcccggaaccggacggccccagcaacgcgaccatctgaccactaggaatatccagactgatatcgttcagcacctgggtgcgaccaaagctcttcttaatattggcaatctcaatgctcatgatgttcctcctgctgtgcgcgtttttcctgattctccaggcgccactgcaacatactttttaaaaacagggtgataatcgccatcagcgttaacagcgccgcagcggtaaaggagccgacggtgttgtagtcctgctccagcaattcaatctgtaacggcaggctcagggtttcgccgcgaatgctgccggaaaccacgctcaccgcgccaaactcgccaattgcgcgggcgttggtcaacaccacgccataaagcagcgcccagcggatgttcggtaatgtgacgcgacggaacatctgccagccggacgcgccaagcaaaatcgccgcttcgtcttcctggctgccctggcttaacatcaccggcaccagttcgcgcaccacaaacggacacgtcacgaagatggtgaccagcaccattcccggccaggagaacataatttgcaggttatgctcgtcgagccaaccgccgagcgggccgttagagccgtagaacagcaaatacaccagaccggcaaccaccgggcttacggcaaacggaatgtccagtagcgtcagcagtaactggcgtccagggaagttaaagcgcgtcaccagccaggccagcagaatgccgaacaccaggtttaccggtacggcaatcagcgcgatcatcaccgtcagccagatggcgtgcagcatgtccggatcggccagattctgtaaaaccggcatcagccccttgctgaatgcctgcacgaagatgtaaatcatcggcaccagcaggatgaacgcgctaaccagcatcccgatgccaatcagaaaccatttgccccagttaatcgggcgcgcgtcataacgcttcaattgggtaacttccgccattaatgacctaccacacgccgaccaaagcgactttgcagagtgttaatactgaacagcagcagcagagatgccgcgaggatcacgctagcaatcgcgctcgctgccgggtaatcaaactcctgtaagcgcacaaaaatcatcaggctcgtcacttccgtcttccacgcgatatttccggcgataaaaatcaccgcgccaaattcaccaagactacgggtaaagctcagcgccacgcccgccaccagcgccggagaaagctccggcagcaccactttgcagaaactctgccagcgcgttgcaccaagcgtttccgccgcttcttcatattccgggcctaactcttccagcaccggctgcacggtacgcaccacaaacggaatgctggtaaaggccatagccaccgcaatccccagccatgtataggtgactttgatatcaaacttcgccagccattcaccgtaaaaaccgtttacggaaaagaggctggccagcgttaaaccggcgacagccgttggcagcgcaaagggtaaatccatcagcgcatcaagcagcgtgcggcctgggaagcgatagcgggttaggatccacgccatcagcagaccgaaaacgccgttaaaaatgcttgccacaaacgcgctcagcagcgttactttgtaggccgcgaccacctgcgggttggtgatcacctcccagtactgcgcccagctcatctgggccagttgcatcaccagcgcggagagcggcagcagcaaaatcaggcacacaaacagcagactggtgccgaggcttaaggtaaagcccggcagcacgcgtctggaggagacagcaaacatcagttacgccccgccgctaacagcttgtctaactcgccgccgctggtgaagtgggttttcatcacttccggccaggagccaaatttgtcttccacgcggaacagctcggtctgcgggaatttgtctttcagtttgtccatcacctccgggttattcacgcggtagtaatagtcggtgatgatggtttgcgcctgcgggctatagagccagttcagataggctttggcggctttttccgtaccgttggcctgcacgtttttatcaacccacgccaccgggaattccgccagaatgttggttttcggaatcaccacttcaaagccctgcgcttcatactgtttacggatgttgttcacttcgctttcgaagctaatcagcacatcgcccaggccgcgctcggcaaaagtggtggtcgcgccacgaccgccagtatcgaacacttcaacgtttttcaggaactgggtcataaactgttcggttttgcctttgtcaccaccgtcagctttatccgctgcgccccatgccgccagataggtataacgcgcgttaccgctcgttttcgggttcgggaaaatcagcttcacgtcggagcgcaccaggtcgttccaatcgtggatattcttcgggttacccttacgcaccaggaagcccatggtggagtagaacgggctgctattattcggcaggcggctctgccagtcggccgggatcagcttgcctttatcgtgcaggatttgtacgtcggtcacctggttataagtgacaacgtcggcttttaagccctgtaaaatcgccagcgcctgtttactactcccggcatgagattgttttatcgtcagtttgtcgccgccgttatcttttgcccattgttgctcaaacggcggattcagggcggcaaacagctcgcgggagacgtcataagaactgttcagcagttccgttgcctgtacatggcccgccagcagcagagaagcgaccagcgcgagactgttctttttcagtaagttaacggccattgcgcacccttataaatttaatgactttctaatagccatcatatttataacggacgtgaaaggagtaacggttttatataccgtttggtgatttggaagttgaaaagggaataagaacttggttcaacaggcgtaattgttgcagtcagtttggacacgaacagcgcggagaaaccggagcgtacacatagtacgtgaggatttcgagcactgcccggggccaaaatgacaaataaaatagcctggtgaacttagttcaagacgaaatcctccccacaaatgcagggaggaaacagaggtgaatcagataccgacgctaaccgtctccggcagtgtgctgccgccatcaatcacattctgtgtaccggttaaatagctggattcatcgcttgcgaggaaggccgccagttcgccgacttccagcggatcggcgaggcgacgcatcgggattgctttcgccatttcagtcagcacgctctctggatcttccgggttgctctggcgggcaatgctttccgccattggtgtgcgcacgtatcccgggcaaatggcgttaacgcgaataccagactgcgcgtactccaccgccaggctttttgtcaggccaacaatcgccgctttcgttaaggcgtacgccgtttcgccaggatcggccaccatatcaccagtgacactagacatcatcacaatgcgaccatctttgcgggcaatcatctccggcagcaccgccttcgtgacgttccatacgcctttaatattgatgtcaatatggaaatcgcgatcgtcatcgctcatatcgaggaaactgcccagacgacaaacgcctgcgttattcaccaggatatcaatgcgcccttctttttccttcgcgcgtttgatagctgcggctacgctcgccgggtcacgcacatcggcgacaaccgccgtacagcgatgaccacgaccacacagttcgtccgccagcttttcgatctcaggggagatatccagcaagattaggttcgcgccatgacgtgcaaaagttctggcaattccttcgccaattccctgcaatgcgcccgtaatcagtgctgtcttgcccgtgagtttacccattttaatgctctccttgttaatacagagcgttacactccattccctctgaaaatacaggataaacaaaatattgctgcggatcagctcactaattcaggaaaatctcaatccagtcgctgctttatgcatcatttcaggcgttgtgttagctcactgctgcgctgaatcattttcaaactctccacatcattgagttgcacaaggccaacaaacagtaaatcggtaacagaattttgcgccgtgcgggtagacatgctgctgctacgccattcggtttctccggaaacggtatcgagggtgaaatgcgccagccgccgcagcggagagtcagtcagagaagtaatggcaatcaccgttgccccctgctttcgtgccgcttctgcgcacaagacaatctcttttttactgccgctgtaagagatagcgatttgtacatcgccttttttcaacgcctgagaaacggtggcttgtacgtgcgtgtcggcttcgcaggccacgcgatagccaattttcatcagtttgaagctcagatcgcgccccaccagcgcgcttccgcccaggcccgttatctggataaacggtgctttactgatgacctcaatgattttttgcagccgcgcgtaatcgagcaacgcgcaggtttgctccagcgccagctctttttcgcgattcagtttgcgcgcgatcacttccaggctatcatcactggtaatgctactgtgcaggtgcagtgccgtggcattcgttttctcccggctggcactgtattcgcctattaacgccatacgcaattcagtaaatccttgcgcgccgagtttttgggcaaatttcactatgctgctctggctaatgccgagctgtttcgccatctgccgactagaaacggattgcagctcactcacgttggcctgcagaaagtcagcgattttttgctcgttttcggtgaattcactccccgcattgcttattttcgtcaggtacaacatcttccactctcctgggctggcagcataaattccgcttaagttcttatgacgctcttcacactctgcgagtgtagactcaatgattcctttaagcctgtcaattcgggatatatgattccatacatctgcaattatttgatcgtaaatagtaaggtcaccaccgatgcaatttgaaaagatgattactgaaggcagcaacaccgccagcgctgaaattgaccgcgtaagcacgctggaaatgtgccggattatcaacgatgaagataaaaccgtaccgcttgccgttgagcgcgtactgccggatatcgccgcggcgatcgatgttatccacgcccaggtaagcggcggcgggcgtctgatttacctcggtgcgggaacatccggtcgtctggggattctggatgccagcgaatgtccgcccacctacggcgtgaaaccgggtctggtggttggtttgattgctggcggcgaatatgccattcagcacgcggtggaaggcgcggaagatagccgggaaggcggtgttaatgatctgaaaaatattaatttaacggcacaggatgtggtggttggcattgctgccagcggtcgcacgccgtatgtgattgccggactggaatacgcacgccagctcggctgccgcacagtgggaatttcctgtaatccggggagcgccgttagtaccaccgctgagtttgccattacaccgattgtaggtgccgaagttgttaccggttctagccggatgaaagcaggtacagcgcagaaactggtgctcaatatgctttccaccgggctgatgattaaatccggcaaagtgttcggcaacctgatggtcgatgtggtcgccaccaacgaaaaactgcatgtgcgacaggtcaatattgttaaaaacgccaccggatgtagcgcagagcaagcggaagcggcgttaattgcttgcgagcgcaactgtaaaacggccattgtgatggtgctgaaaaatctcgatgccgcagaagctaaaaaacgcctggatcaacacggcggctttattcgtcaggttttagacaaggaataacccatggccaaagagatcagcagtgaacttctgaacaccattcttacccgtgtcggcggaccgggaaatatcgccagttgtggtaactgtatgacgcgcctgcgtctgggtgtacatgacagtagtctggttgatcccaatatcaaaacgctggaaggcgtgaagggcgtcattttgaccagcgaccaggtgcaggtcgtttttgggcctggtaaagcgcatcgtgccgcaaaagcgatgagcgagctgctgggagaagcaccggtacaggatgccgcagaaatcgccgcccagaacaaacgtcagttaaaagccaaacaaacctccggcgtgcaacaatttctcgccaaattcgccaccatcttcacgccgctgatccccggttttattgccgccggtctgctgctggggatagcgacgttaattgccacggtgatgcacgttccggcagatgctcagggaacactacccgatgcgctgaattttatgaaggtgttcagcaaaggtttgttcactttcctggtgattctggtgggctataacgccgcccaggcatttggcggcacgggcgtaaatggcgcaattatcgccgcgctctttttgctcggttataaccccgcagcgaccaccggttactacgccggttttcacgatttctttggtctgcccatcgatccgcgcggcaatattatcggcgtgctgattgccgcgtgggcctgcgcccgcattgaaggcatggtgcgccgctttatgccggacgatctcgacatgctgctgaccagcttaatcaccctgctgatcaccgctacgcttgcgtacctgatcattatgccgctgggtggctggttattcgaaggtatgagttggctgtttatgcacctgaacagtaatccgttcggttgtgcggttttagccgggctgttcctgatcgccgtggtatttggcgtgcatcagggctttattcctgtttacctcgcgttaatggacagccagggattcaacagcttatttcccatccttagtatggcaggcgcgggccaggtgggcgcggcgctggcactctactggcgggcgcaaccgcacagtgcgctacgcagtcaggtacgcggggcgattattcccggcctgctgggcgttggtgaaccgctgatttacggtgtcaccctgccccgcatgaagccgtttgttaccgcctgtttaggcggcgcggcgggcggtttgtttatcggcctgatagcctggtggggtctgccgatgggcttaaacagcgcctttgggccgtctggtctggtagcgctgccgctgatgacttccgcacaaggcatccttccggccatggcggtttatgctggcgggattctggtggcatgggtttgcgggtttattttcaccacgctctttggctgccgtaacgtcaatctggactgatatcatgaaacggacaatgctctatctttctctgctggctgttagttgtagcgtcagcgccgcaaaataccctgttctgacagaaagcagcccagagaaagcagggtttaacgtcgaacggcttaaccagatggatcgctggattagccagcaagttgatgtcggttatcccagcgtaaacctgctgatcattaaagataatcagattgtgtatcgcaaagcctggggagcggcgaaaaagtacgatggcagcgtgttgatggaacagcctgtcaaagccaccaccgggacgctgtatgacctggccagtaacaccaaaatgtacgccacgaacttcgccctgcaaaagctgatgagcgaaggcaaactgcatcctgacgatcggattgcgaaatatattccggggtttgccgatagtccaaatgacaccattaaaggcaaaaacaccctgcggatttctgacctgctgcatcacagcggcggtttcccggcagatccgcaatacccgaataaagcggtcgcgggcgcgttatattcccaggataaaggccagacgctggagatgatcaagcgcacgccgctggaatatcagcccggcagcaaacatatctacagcgatgtcgattatatgctgcttggatttatcgtcgagagcgttaccggtcagccgcttgaccgctatgttgaagagagcatttatcgcccgctcggcctgacacatacggtatttaacccgctgctgaaaggctttaaaccgcaacaaattgccgccacggaattgaacggcaatacccgcgatggcgtgatccatttcccgaatatccgcacctccactctctggggtcaggtgcacgatgaaaaagccttttatagcatgggcggcgtttccgggcacgcaggtttgttttccaataccggcgatattgcggtgttaatgcaaacgatgctgaacggcgggggctatggtgatgtgcagctgttcaatgcggaaacggtgaagatgttcaccaccagctctaaggaagatgccacttttggcctcggctggcgcgtgaatggtaatgccaccatgacgccgacgtttggcacgctggcaagcccgcaaacctacggtcacactggctggaccggaacggtgaccgttatcgatccggtgaatcatatgacgattgtgatgttaagcaacaagccacatagcccggttgccgatccgcaaaagaatcccaatatgttcgaaagcggtcagttgccgattgcaacttatggttgggtagttgatcaggtgtatgcggcgttaaagcagaagtaataaaaaggccagtcagtaatgttactggctggtctgagagtgctgacaaacgcaaaactgcctgatgcgctacgcttatcaggcctacgtggagcccacaatatattgaattagcacgatttcgtaggccggataaggcgttcacgccgcatccggcgtgtacaacgcgcacttggtcaacaatctgaggccagtcagtaatgttactgcctggcctttaatcaatgaatcagaaacgcttacagcgccatcaacttgtccaggctcggtgcgaaataatagccgccggttaccggtttggtgaaacgcaacatcgcatcacgcttaccatcggtatcgccaaacatgctcagcagttgctgctcaatgttatgcagacgcgcgcagtaggcgcagaagtacagaccgtgagtgccactggcagtgccgtacggcaggctctggcgaacaatcttcagccctttgccatcttctttcagatcaacgcgggtgaggtgagaggtttccggacgttcgtcgccgtcgatctcttcgttggcctctttggtgcgcccgatcaccatctcctgatcgtgaacgctcatccggttgagctgcttcaggttgtgttcccaacgctggacaaacacatagctgccgcccgcatccacgccgtctttgataaccgccacttcgcgacgcgtctcttcacccgccgggttttccgtaccgtcaacaaagccgctcaggtcacgctcttcaacccaacggaagccgtggatctcttctttcacttcaatgcagtcaccaaaggcttccatcgccgcctgggcgacagagaagtttacgtcgtgacgcagagaaagaatgtggatcaacacatcgaactgggtcgtcggcgcaaggcctttaccgtagcccggaaaatctttcagctcttctgccccaacgccgccgctcagagcgcgccaggtgttgttaccaaaggcaaccaccgcaccaagatgcgcgtccgggaatttcgcttcaaaagttgccagtttgtcggcaaatgttttactggccgcacgcagggcgtcaacttcccctttcacgttggcttcgatccaaatcgccgcgcggcaatgttctggcaaaatgccactctgaacctgagacattgttcctcctgaaaataataatgccacgcaatccgtggcattgttgagcgctattttacgtgttttttcgcggcggcggtttgttcagacgcaaattaacgccgccagataattttactgactttccagtttttcagggtatcgtcgctaggcattaacccttcaggaccacgccattccccgctgaactggtagctaatatgttgactgccttcggctttacattcgacggcacgattatcatcaccatcagctttttggcaattgccaaatgctttgctgtaaaggtcgctaaacggtgtaccgattttaacaccggtgtcagcaggaatatcgctatccagcacgtcaatgcgactgatcgtgccttgatcgccgttaatcaccatcgccacgttgtcgcccttcatcacttcaaaaaagcgcaccacgttgccgttcgcggttttcattccgctgcgcaggcgataatcgccatcaagcgcatcggcaatggcttgttcttgcagtggtgtggacgccgttaattcacccacgccctgctcgctcactttggtggagctcccaaaccagttccacgggttagcggcagaccagttaacactgctcatcgtggaacagccggtcagcatcaatggcatagcgcataacattaaacgcaggcttttcatgtcacttcctttggttattcaataacgttgcttggagtgcaaattcaccaaaaagtgccgttattcttttacttcataaaaacaagcgcgtaaacgtcgattggtcagcagccagattaacgccacaatatccgccactaccagcgccagaccgataccgctaacggattcaccgttcagccacagccacggttgccagcaaagtaaaaccacctgcgccaacagcaacagaaaatagagtacacgccaggtgcgaggaaacgtagcccgccgaccgctcaacaaaaacgccagcaccgccggaatgccaggaatcagccccagccagaaattatcgtgatcgggataaaacagatttagcagcgcagtaccctgctcgcggctcgcaccggcaatgacaaacagcacccaggttcgcgcctgaagcaatagcacaagccagaagagcaagggtaaacgcaggcgaccgtgcgcatcataatggacaggatgaaactcagtactcttcatcttcaatcaaacgcttacccagactcagcacgtcggcgtgttcatatcccaggcgttcatacattccgagcaccatgtcgttatcttccggcacattgatctgaattttcgggcagccacgagcaatcagctttttctccagccgattaagcaacgcattggcaatcccacgcccacgaaactctggatgcacgccaagataataagcagacccgcgatgcccgtcataaccgcccatcaccgttccgaccacgtcaccgtttacctcagcgaccaaaaacaaactgacgtcatggttcatcttacgctcgatgtccatttccggatcgttccacggacgcagcaagtcgcaacgctcccaaagggtgatgacctcttcgaaatcttcctggcgaaatacgcgtatctccatggtattcgttacctttttgcgggttaaaaggctgattatggcgtgaacggtcgaattagccaatatctgacgaaaatcggttgaaaaagtggcataatggggagttgtcaactattgaaatgaaaagtaaaacaattctcaacagcaaaccgtcgtaacggattacgcgatacgatataacatctggaactttattattacaactcaggccgtatgagcacttttaaaccactaaaaacactcactagccgccgccaggtgctgaaagccggtttggctgccctgacgttgagtggaatgagccaagccatcgccaaagacgaacttttaaaaaccagcaacggacacagcaagccgaaagccaaaaaatctggcggcaaacgtgtcgttgttctcgatccaggtcacggcggaattgataccggagcgatcggacgcaacggtagcaaagaaaaacatgtggtgctggcgattgctaaaaacgtccgttccattttgcgtaatcatgggattgatgcgcgtttaacgcgttctggcgatacgtttatcccactttacgatcgcgttgaaatcgcccataaacatggcgcagatctgtttatgagtattcatgccgatggctttaccaacccgaaagctgccggtgctagcgtatttgccctctctaaccgtggggcaagtagcgcaatggcgaaatacctgtctgaacgcgaaaaccgcgccgatgaagttgccggtaaaaaggcgactgacaaggatcacctattgcaacaagtgctgtttgatctggtgcaaacagataccattaaaaatagtctgacgctcggcagccatattctgaagaagattaagccggtgcataaactgcacagccgcaacaccgaacaagcggcatttgtggtgttgaaaagtccgagcgttcctagcgtgctggtggaaaccagctttatcaccaacccggaagaagaacggctgttaggcacggcggcgtttcgtcagaaaatcgccacagcgattgctgaaggcgtgatcagttatttccactggttcgacaaccagaaagcacatagcaaaaagcgataagttatgaaacccgacgcacaccaggttaaacagtttctgctcaaccttcaggatacgatttgtcagcagctgaccgccgtcgatggcgcagaatttgtcgaagatagttggcagcgcgaagctggcggcggcgggcgtagtcgggtgttgcgtaatggtggtgttttcgaacaggcaggcgtcaactttagccatgtccacggtgaggcgatgcctgcttccgccaccgctcatcgcccggaacttgccgggcgcagtttcgaggcgatgggcgttagtctggtagtgcatccgcataacccgtatgttcccaccagccacgcgaatgtgcggttttttattgccgaaaaaccgggtgccgatcccgtctggtggtttggcggtggcttcgacttaaccccattctatggttttgaagaagatgctattcactggcatcgcaccgcccgtgacctgtgcctgccatttggcgaagacgtttatccccgttacaaaaagtggtgcgacgaatacttctacctcaaacatcgcaacgaacagcgcggtattggcgggctgttctttgatgacctgaacacgccagatttcgaccgctgttttgcctttatgcaggcggtaggcaaaggctacaccgacgcttatttaccaattgtcgagcgacggaaagcgatggcctacggcgagcgcgagcgcaatttccagttatatcgtcgcggtcgttatgtcgagttcaatctggtctgggatcgcggcacgctgtttggcctgcaaactggcgggcgcaccgagtctatcctgatgagtatgccgccactggtacgctgggaatatgattatcagccaaaagatggcagcccagaagcggcgttaagtgagtttattaaggtcagggattgggtgtaactccctcacccccactcccgcatccgctgatgcagcgtcagactcggcttctcggaaaacagctgctggtaatccgtggcaaattgccccagatgccagaatccccactgcatggcggcgtcttttaccgtcatactttggctccacggacttatcagttcgcggcgtacggcgttcaggcgaatgcgtttcagccacgcgttcgggccaatgcctaaaatagcgtgaaacgcgttttgtagcgtgcggcggctgacatgcagttgattacacaaatccagcaccgtcaccggttcggacatgttttccagcacatattcacgggcgcgggaaagcaatcgacggtaactctgatgactgatgctttccgccgtcaccattggttgcgcttcttccagcatggcccccatcgccattagcaaattatcccccagcacttttcgcactgcaggctgatggagattttccggattctcgcaaaacgtcgccagcgcctgttggacaaagccccacagcgcggctttatgctgctctttcacttccagcgcgctctggttacgcaacatatgtaatacccgatccgggttatgcaaaaagttagcctgccgggtgatgacatcttcagaaagcaccacgcccaggatcgtgtaatcatccggcgtgctcagttcaaattcagtgccaccagggcgggtggcgatttccgcgcttcccagacattggctaccgataaatccctgctcaccgcgcgtcgccggaatgccaaaccagaagctgttcggccagaccaggcagctctgacgcagcgccagaccggtgtattcacgaaaaacctgaatatcatcgagtagaatttccgtaaattcaccatgaaacttgcccggatgcagctgatcgtaaatctgctgccaggcggtaatcgttaaagcatgttcatagacatccgttgtctgtcgttgatgaacattatccacttcgaccttcggcgtgagcttcaggttttcgggtaagggttcatgataaagatggtgcaaattggctgtacgggtctttttcatgatgttaatgccgggtgttgtaggacacccggcacctccgacaggttaatggggcttgagacgataacgactactgcgtttacgtaacgtcccggcagaaaagagctgttcgagcgcatttctggctttttccagcggccagccaaagtgggcagccacttctcctgccgtcattccctgacgtacacttgttaacagcgccaacaactcgtcagcagattccgcgacgataactggcgcgtcgggttcccttacgggttgcttcggctggcggttaaagccagtaaccagccactgggtgtcatcgtctggccgaccgatctccttgcggctgatgacacgcccggtacgcatcgcggcagcacaacctgcgtccagcgccgcacgacacgccgccagatcgccttccaccaccagcgttaagcgaccagggtcaagcacttcgtgactgagcagacgaacgttagctgctttgagcatggcatccgctgcatctatcgcggcgaccatgccgtccacttccagcaatcccagtgcattgatcatcggcaacctccgttacgcacgctggattggattacgcgcgatttccagcactgcatcggtaaaggcgttacaggctgctttacacgctgcctggctaccggttaaaaatgctgcgctgtagttggtttcagacggtggcgggacataggtcgccagctgtacgtcggcagacttcagggctgcatcaatgccataggtcgcttccagcggcggtgccaccagatacgccatcggatcgccaagcgtgatcccggcggtactactgagataagaaccggtacggctaactacatgtgccaggaatgccgtatcttgcgcgtcattagcccactggaaagctgcgccattttcaatatgcgcaatcatcgcatccagacctgcacgcacttccgccgggtttggcccaccaagcataatcagcacttcaccggcagtcggactcgggccgtgtgcagcgcccgcatataggctgcggccatacaccacttccaccatcgcctgcttggtcgcttcatcagcggcaatgtaggtgacgtcatcggagtcggcagaaatcagaccgaggctacgaatatgcggcggcaatttcagttcacgcgcaaaatcggcgttaacggaggcaatcacccgcatagcggtgacagacggtcgaatcaaatctaaagctggcatgatgcctccttatcgggtcatgttgatgccggatgctttctgctccagcatacgtttcgccaaatccacaatgacggctgcggcttcaaccggcggcgtgccgccctggtgaatgttagagatacaggtgcgatcggcctcaacggtggtcgccatacgcgggctgtaaacggcgtagcaggagaggctttcactctgacccaaccccggacgttcgcccaccagcaggatcactactttcgcgccgaggatctcaccgatctgatcttcaatcttcacgcgaccataacgaacaaagaatggtgtaccgactttcagcccggcctgtttcaggcccgccatcagcggtggcaggatctcttcgtagttcacggtgatcgcatcagtactcaggccatcagaaataacgacctgtacgtccggattggcaacacactgcgctttcagcgcttcaacagcttctgcacacaggcggcggcccatatccgggcgagtcaggtagagatttttgtcgctaatttcagagcgtacttccagcaagccctgcgctttcacccactcttccggcacttctttcagtacggtatctttgctacgagagtgatcggccaggaaacgcagcagcgcctgcgtacgtggacgcggaccggcacgaccggtacaaacgcgggccacggtgctgcggcgcagttctgttaatacgtctgcgcgatgcggattttcaacaccaatccacgcttttgcttcagcggaacctaaatccagcgcacagctttcgctggtcaccggtgccgcacagttggtggtggcgcactttgcttcactcggcgcgggggccgcttgtcccatactcgccatcacgctgcgtacaatttcttcaatctgtttttgatccatgatatgttatctccgcgtcatcagaagaacagactcggatcgcccgcccgtttggtcaggcgaccgtttgccataatgcccatgctttccagccagcgttcaaactccggactcgggcgcaggttgagtaactgacgcacagtggcggtatcgtggaatgcggtggtctggtagttgagcatgatgtcatcacccagcggcatccccatgatgtagttgcagcctgcggtggcgagcaggatcatcaggttttcgttgaggttctggtcagcgtcagcgtggttggtataacagcagtcacagcccatagagatgccgctcagcttgcccataaagtgatcttctaagccagcacggataatctggcggtcgttgtagagatactccggcccaataaagccgaccacggtgttgacgataaacggatcgtaatgacgcgccagcccgtagttacgtgcttccatcgttacctggtctgcgccgaagttagcgccagcggatagcgcagagccttgtccggtttcgaagtagaggcagttttccccggcgatacggttgaactccgcgcccactgcgcgcgcttcgtcgagcatcgccagctccacgccaaactctttcagccctttttcgctgccacagatactctggaaaatcagcccgcccggtgcgccacgacggatcgcttcgatctgggtggtgacgtgcgccagtacacagccctgagttgggatgttgaatttgtcgatcacgccatagatggtatccaacacgcggcttaagttttccacgtcgtcagtcaccgggttaacgccgatcaccgcatcgcccaccccgaaggaaagcccttcgtagatttgcgcggcgatactttgcacgtcgtcacgggtgtcatttggctgcaaacgggcgctaaaggtgcccggaataccgatggtggtattggcctttttgattaccggcattttcttcgcgccgtagatcaggtccgcgttggagcaaatcttcgctaccgccgcgaccacttcgctggtcagccctttgcgggtaaaggcaatgtcgtccacgctggtttcatcgctcagcacatactcacgcagttcgctgatgctccagtttttaatctggttgtaggccgtttcgttaacatcgtcctgaatcagccgcgtcacgcagtcatcttcataggcaatcaccggattattgcggatgtccgctacggtcatttcgctcaacacctgctttgccgccacgcgctcctgactgcttgccgctgcgacgcccgccagcacatccccgctacgcagttcgttggctttagccagcacctcttttacatccttaaactgatatacattgccgaacaatgtggtctttagtttcataagtcgttccctcaggaaggaaatgcgagacttttcaccgtcaccggcacaacgcttccgccaaaaagaggcgtaccaatgtcgatatagtcccccgcgcggacaatcacttcgtcaatgactgccaacgggagttgttgtagctgtgggcgcaacaacatgcccagagctttaccaaagtcctgcccggccaccaccagcaggggatgcggattcggaaaacgcgcgacgaaatcgaccaacgcgttgatgaccgtcagtaccgcggcgtaacgcacaggcaggctggcgggaagcgccagcacgtacgcgtcagttttgggatcaagatccagctgaatcagcgcctgttgccaggcccccaccagatccgtttcatcaatcgggatcgccaccggcaaattgcgcagcggcagttgtacgccctcaagccagattgtgctgccagagaggctaagggtatgcgcgcccgcgccaatcaccgtggcgcgcacggtttgcgccggaaactgtacgttcatctcacgcaggcgcggatggtcatgcagcgcagttgccagcagcgggccaatatcggcaaaacagaacgggtcggcgggctggtggcgataacattcgcccacgccgccagaaagcgtaatgatttcgggcgtaacacctgcgggcagcaaaccggtttgcatcaatgcctgcgcgagcggactgagcgttccgtcaatcacttcgacaatcagttctgccatccgccgggtcacctgcaccagctgcgcgccggtcaggctacgggcgtcggtgcctgcaccgaagcactcatccacaatcatctgccccggtttatgagcgtaaaccacgcgcccgtggctgtcggtttccagcaggcgaccaccgacgttgaggcaggcagtgccgctgatttttccggcatcgaacagggcgtagttcgcggtgccaccgccgatgtcgatattcagtacccgacacagccgttgttcagaaagggtttgtgccccggctccgtgaccggcgatcacggattcgaggtgcggcccggcgctggcaacgacaaaatcgcccaggctctgagagagcgccatcaccgccgggcgagcattgcgggttttcgcgctttcaccggtgatgatgatggcaccagaatcaacgctttccggctcaatacccgcagcatgatattgctcgagtattaaggttttcagttccgcttcttttaaaccgccctgtttatcgacaggggtaaagaacaccggactttgccagctaatttcgcgtttaatgaattcgtagcgcggcacctggctcaccgccgcacggttaaccagctccagccgggagaaaatcacctgggtggtggtggtgccgatatcgataccgacgctcaatagctggcgagtgttcacgattgtgcctccgcttcggtttaagtcagctttgtgcctccgcttcggttttagtcgcggtcgcgtcttcttttggcaccagcatcatcgccacgccaatcgccgttacgccgccgatcaacttgccgacaatcatcgggaagatcatggcgttcatgttggcagcggcgaagcctaagtggtcgcccagggcgaaagcagcggaaacggcgaaggcgcagttgatgactttgccgcgggtatccatctgcttcatcatgccgaacatcgggatgttgttggcaagcgttgccaccatgccggctgccgcgatgttgttcatattcagtactttaccgacgctcatcagcggtttttcaaaccagcgagtcagcagcagcaccatcggatacgcccctaacagaacgcaggagatagaaccgataacttcaatggcgcgcatcacctcaccgggtttatcgccaggggccataaagataggatccagaccggggatcagttcccagccaagcaggaatttcactaccgcagcggcaagaccgagggtgatcaatgcaacgaggaatttggcgaagatctggaagccgttgatcattttttccgggatgaatttcagccccagcgccaccagaatcgcaacaatgatcaccgggatcatgttcatcaggatcagggcgaaagtgaattccaccggctggccgttgatctgcacaccggagtacatagcaaccagaccaccagcgatacaaccaatcggaatggtcacaatgcccgccagcacgccgagcgccagataacgacggtcagaaggttcgataatgccgagcgccaccggaatggaaaacacaatcgttggccccatcatgctcccgagaattaacccagagtatagccacgcggctacgtcgccgcccgccagctctttggcgaggaagaagccgcccatatcgcacgccagcagtgttccggcgaacatgcttgggttagcgccgagcatttcgtaaaccggaataattaccggcccgagaacgtgagccagtaccggtgccagcgcggtcataccgaccatcgccaggcccagtgcgcccattgccataaagccttcttcgaactgaccgccacttccttcgatacttttaccgaacttaccgaggaaacgagcagaaccgccgaactggctcaggatcctgtctacggcagctatcagcataaagaacatcatgatgtacatgatgatttcgttaattcccatcgcctttactccctgttagttgttatttattggcggatgcggcgtaaacgccttatccgccctacatgtgcaatcccgtaggctggataagacgcggcaagcgtcgcatccggcaattgcaccgcgccactggcggatgcggcgtgaacgccttatccgccctacatgtgcaatcccgtaggctggataagatgcggcaagcgtcgcatccggcatttattgcgccgctgcgtacaggccgacaatctgctccaggctggcggtacgcgggttactgcgcagacaaatatcttccagcgcggcctgcgcccatgcgccgtaatgcgcagatgtcgcaccaacatcgcccagtcgtttaccaatcccaacttccgcaatcagctcacttaccgcgttaatagcgtcacgatcgtcggattttttagttcgcagtgcccgaccaatctgactaaagcgttcacgacaaaccatccggttaaattccatcaccgttggcagcaacatggcgttcgcgagaccgtgcggaatatgcagcgccgcgcccggctgatgcgccatcgcgtggcacaacccaagacccgcactggaaaacgccattcccgccatacaactagccagcaacatgctctcgcgcgcggcaaggtcgtgaccgtagcccaccgctttcggcaggcttttgccaatcatcgcaatggcaccaatcgccagactgtcggtaaacggtgtagcgttcagggcgctgtatgcttcaatggcatgggttaacgcatcaatgccggtcatcgccgtgacatggctcggcacaccttcggtcaatgcggcgtcgaggatcgccacatccggcatcaggctggcatgggctaacacctgcttgcgcccgctcaccgcgtcgataatcaccgttacattggtggtttcagagccggttccggcggtagttggaatggcaatcagcggcaagcgcggttgcagaacgctggtttcactcatctctgccagcgtgctatccgggttcgtcaccagcaacgtcacggctttcgccgcatccagcacgctgccgccgccaaacgcgatcaccccatcacagccactctcacgcaactgcgccacggctgcacacacgtcggtaatgcacggttcgcccaccggacatggccagagcgtcatggcgatacctttaacggtcaggctacgcgtcagcccggcggtcatccctgcctgatgcaaaaagctgtctgccatcacgaacagatgtttcagcccacgcgtttgcgcttgctgtccgcaactgctcacgctgcccggaccgcaaagcgtcaccggtggaacgctaaatgtttttacccgttgcagattcagggtatcgaacgcctgaaagagcgcggtctgcaattcattttgcatatagcccctccgctttctctcgcccactactggcgatcgccagcggggtcataaacaaactgtgctgcggtaaatgcacctgtaacgccgggaattgtttgcgaaacagttccgccacgcccggttgcatacaagagccgcccgccagccataaatcagtaatgccctgcccttcaatatgccgggcgacaatgtccgccattttttcgtacaccggtttcaccgcaggccaaatctcttcaccgtgaccgcgcttgtactgctccgcctcttccaggctaatacggcgatttccggcgagagtcagagagatgtgatgtccgccggtggcttcatccgcgctgtacgtcaccttgccctttttcacgatggcaatgccggtagtgccgccgccgatatccactacaccggcgttgtccagttgcagcagatccgcaactgcggttggctcatccagcacatggctcacttccagtccggcagattccagcacgttgatggaaatacgcgggtccgtacctggaggaaaactagtcgccgcatggctaaaacgacgaccgaattgctgctcgagcgtgtcgagatggcgacgaacaatggtgacagcgccgaagaaatcccagacgatgccgtcgcgaaccacatcggcccagtcgaggcataccgccactggctgaccgtcgcggtcgacaaccatgctcaccacatcgcaggtgcccagatccacccccagccacagcggagattccgtcgcggcgggcgtctggttacacagcgttgccgccgtttgcagacgtggggtgagccattgttcgtcgtgcgccatctgttactccttaaacaatgcgaaacgcatcgactaatacacagcgacgcagacggacaaacgtacgcgcgctggttaccccttcaccggttggcgtggtgatggtcatggtggtccagccttccccgcccagccccagcccggcaatgcacggtccgttcttaacgaaaatgctggtatcaatagcattcgccatctggttcatgttttcgatgttgcggctgtgcattgccgccgtgtggtggcaaccgccttccagtttcaccgctagcgcaatggcatccgccacgttggcgacgcgcacgacgggcaacaccggcatcatcagttcagtcacggcaaacggatgttctgcggtggtttccacaaacagcaggcgcgtttcttgcggaactttaaggccgattgccgccgcgattttgcctgcgtcgcgaccaacccagtcacggctgacggtgccttttccgcgctcgtcgatatttttcagcaacaccggttgcagctgctgcgcctgttctgcggtcagtttcaccgcgtgctggccttccatcagacgcatcagttcatcggctacgctatcaacaacaatcagtaccttttcgtcggcacaaatgatgttgttatcgaaagaagcgcctttgacgatggactgagcggcacgggcgaggtcggcggtttcatccaccactaccggcgggttgccagcgcctgcggcaatcagacgtttattggtgtgtttacgcgccgcttctactaccgcttcgccgccggttaccaccagcaggccgatacccggaaacttgaacaagcgttgcgcggtttcgatatccggatttgccacagtaaccagtaagttttccggcccacctgcggcaacaatcgcctggttgagcagcgtaatcgcccgctgggagacttttttcgccgccggatgcggggcaaaaatgacgctgttgcccgcggcaatcaggctgatggcgttgttaattacggttgccgccgggttagtggaaggcgtcacgctagccaccacgccccagggtgcgttttcaattagggtcaggccgttgtcgccagtcagcacttgcggagagaggcactcaacgcctggtgtgccgcgcgcctgagcgacgttttttgcaaatttatcttcaacgcgccccatgccggtttcactgacggcaagttccgctaaatctctggcgtgtttttcgcctgcttcacgaatggcagcaatggctaactggcgcattgccacgctttttaacccttgctgggcgactttggctgccgcaacggcgtcatccagggacgcgaaaacgcccatctcatgaacggcggcggacggcgtgtcactgctttgcattttcagcagtaccgctttcaccacctgttcaatatcctgttgattcatgatgttctgccttatttgtggaaaattacctgaccgccagacaccacctcatcgacaatgccaatcacgcacagatcgaccggactcgtttcgcttttatgcgcctggcgggcggaactgccactcaccagtaacacccactccccggttcccgcgccaatattgtcgatggcgacggcgcattgcccgtcaggattaccttgtggatcaatcatttccaccatcagcaatttgtcatgcgccagtccgtgatggcgtacggtacaaacaatttgtccagtgacgactgccagtttcatacccgcctccgtggcgtatttcaggtaaaagctccccctaccctccgcagaaggtaaaatgaaaaaggagagagcgtgacgcccgaatcgacgtcacacagggtgattacaggttgctgctatcgcctttcaggccgatcgggaagacttcttccaggtcgccgtgcggacgcgggataacgtgtacagataccagctcgccgatacgctgtgccgctgcggcacctgcatcggtcgcggctttacaggctgcaacatcaccacgaaccatggcagtacacaggccgccgccaatctgcttaacaccaaccagcttgacgcgcgcagctttcaccatcgcgtcagaagcctcaatcagtgcaaccaggccccgggtttcgatcattcctaatgcttccattgtgctttcctctttatcagggtccagaacgggaccgttcattcaaccagtgtttgtaaactgctttcgcggttcacttctgtctgacgcggcacagctgccaccagcgccagctcgataatttcctgcacgctacaaccacgagagagatcgtgcatcggcgcggcaagtccttgtatcagtggcccgacggcacgatatccgccgagtcgttgtgcgattttgtaaccaatatttccggcttccaggctcggaaaaaccatcacattggccttgccctgtagcgggctggcaggcgctttttgcgccgccacttccggcacgaaggcggcgtcaaactgtaactcgccatccaccaccagctttggtgcgcgctcacggacgatttctgtcgcctgctggacgttagcaacacaggggtgacgggcgctaccattgctggaaaagctcagcatcgccacgcgcggctcttctccggtgatggcgcgccaggtttcggcactggcaagcgcgatatccgccagctgcgccgccgtcggctgtggcaccacgctgcaatcggcaaagcccaacgccgggccgctgtactgtggcaacatcaggaaaatggaagagagcgttttacagcctggctgcaagccgataatgcgtaatccggcacgcagcacatttgccgtggaagagaggttgcccgcgatacagacatccgctttaccggcgctgaccattgctgcggcgaacatcagagggtcggtaagtttttccagcgcatccggcggcgttttttcgcccgcgcgggccagccagcgatgagcaaattcttcccgcattgcgaggttgccatgcggatcaatcacctgtagcccgtccatcgccacgccgtgactgagcgcaaactgacgaagttcaaacggattggcgaccagaatgggcgttgccagaccttgttgatgtaaatattgcgcggctttcagcacacgttggtctaacgcatccggaaaaaccactctggcgggcgctcgcaacgccagttcacgacaacgttcaataatcattgcgtttcccccagtcgttgttggatctgcttcaccgttagcggctgcttcgttacgctcaggatcatcatcacgtagaccgtgctgctaaggcggttcagcgcctgcaaaatgtccgggcgtaatacttcaaagctgcgggtgataaagacctgcgccgctacggtttcggtttcccgcactttggtgcgtagcagattgagcaacgcagcatcgcgcccgtggctggcttccggcaccagatgatcgtggtcgagatagcgcagcggctgatgagaaagccgatgcagatcttcgtcagaaagcccgacaatcgcctggcagcccagcggttcccccagcgcatcggcgcgcataatgttgccaagacggctacggatatccgccagccacggctgccacggttccgccagttcaatttgcagccacactgccagcgcaatggtgctgtcgagaaccgcgcgaaaacccagacgcggatcgcttttggcgaccattttttccgcgctcaggtgagtcagcgtatccggcttttttgccaccggctggcgacacagttcgcagcacgcctgcggatgttcatcgctactggtcagcccatgaacgggctgcggctgctgctgttcatcgtcaacaaacaggcggccctgctcgtcaataaacttgatgcgcagatggcggctttccagcaactcccgggcagagggcgtcaggcgactgtccgcagggagatggatctctgcgccttcgctgagcgtatggttcgctcttagccatgcttcggtgatgaaatctttcatagggattgccagttagccggccaggcgacatacaggaatttcacgctggatgtcgtaccaaattcgatgctggagcctttcgggataaacatcacgtcgcctgctttggcgatcatggtttggccttcgtggcgaacatgcagctccccttccagcaccatgtcgatttcgtcgtagttcagggtccacgggaagaatgcgttctcccactgcataaaaccggcggccatgctgctgccgtcgtctccggtcacaagatcagtcaagcccacgcaatgcggctctgcgccgtcgaaacgaccaaacttgacgctactgccatcaatcactttgatgccgcctttgccggtcacgcttttgaagctcggctgcattgcgccctgctccaggctctgtttttccttcatcactttttccatcagctgtgcgaccaggctttcggtaaactggccttccggcagctgggcaatgatggtttcgcggatgcgctggctttcggttttgtcggctggcacgctggcgggcacggacgccgttaccgggatgctttcatcacattcggtgatggtaaaacccagtagatccgccacttcacgggcttccggggtaataatgctggcgcgcagaaccacggacattgcctgttcgccgcgcgcgtgtgcttcacgaatatcattcgctgtgatgagttttttcacctgcttcctcctgtttggtgagagatgccagataatccaccagttgctgcacgctttgcgggtcgtggctgtttagctcgaacatcggctcttcgaaacccgtctcaagcaataactttcgcgttgcggcgacgtcagcatctggcatgtccgttttactgatgacggcgatttgccgtttgctgacgccaatatccagcaacccggcaggcaaccgactttccgggtcatttgcgccatggacatagatcagcatgtctacatcctgtagcgtggtaattaaggcgtgataccagcggggatggttaaaatattcacccggcgtatcaatatcgcccttatcattaaattccacggcctgtgtttttctggcgagggtataattcccctgcaacgcattaaataacgttgtttttcctgccccgacgctacccacaaacgcaattcgtttcatgaatgcctcgtattaacttttggtcatttcacaaagcgtataatttaataagcgacctaaaccgctgacggtttgacttaacgcttcttctactgcgcccacgctgccataaatcaccaatgcaccgctgaatcggtcgagaaaaccgatatgcacatcagcggctttcagcgctaaatcaccggcgatcatcgccgtttcgccgggagttagcgtcataatgccaattgcgcccgcatccggaacgccgattttcttcgccagttcctcaccgggatgcgcgatgagatgcgccagtgtgacctgtttgccgggcacaaattcctgaatgatgcgttctttatccatgagtcgccgcctgtgaaaaactttcgtgtatcgtgacaatttttcgtcagagtaaataacaaaattcggcaagcgcgtttaaaaggtgaggtagatcactaagaatggagagatattcgctgtggtgcataaactttcatatgcaacgcatgaatataaataaaataatatcgagatattatatagactgcttttttttattattcgcaaactcagtaataagctttactaatatattgcagctaaactgcttaccctgaatattcagggtaagcgtgagagttaaaaaaaattacagcggttgggtttgcgcttctaccacggccagcgccaccatgttgacgatacgacgcacgcttgcgatcggcgttaacacgtgaaccggtttcgccacacccatcagcaccgggccgacagtcacaccttcgctgctggaaacacgcagtaagttgtaactaatgcgggcagcttccatgttcggcatcaccagaatattggcggaacctttcaaagagctgtccggcatacggtcgttgcgaatcgcttccaccagcgctgcatcgccgtgcatttcaccatcaatcatcagttctggtgcacgttccctgaccagttccagcgcctgacgcattttgctgctgctcgggcagtcagaagaaccaaagttggagtggctcaacaaagcaacgcgcggctcaataccaaaacgacggacagtttctgccgccatcaaggtgatctccgccagctcttctgcatccggttcatcattaacatatgtatcggcaataaaggtgttaccactcggcagcagcagcgcgttcatggcacctgcggtgtgaacgccatcgcgataaccaaagacatttttcaccacgctaaaatgttcatgataatcacccaccgtaccgcaaatcattgcatcggcttccccacgctgaaccatgatcgcgccgatcactgtcgggttactgatcagcgcccgctgcgcctgttcctgagtgacgccgcgacgcttcatgatctggaagtattcggtccagtactctttaaagcgcggatcggattcgttattgacgatctcaaaatcaacgcccgctttgatctgcaagcccagtttctgaatgcgcatttcgatcacgttcggacgaccgataaggatcggtttcgccagtcccagcgttaccagttcctgagtggcatgcagaacgcgcgcctcttccccttccggcagaacaacgcgcttcggcgctttgcgagcctgggagaaaatcggcttcataaacaggttggttttgtaaacgaactcagtcagcttgtcgatgtagacgtcgaaatcagcaatcggacgagtcgccacgccgctctccatcgcggctttagcgaccgcaggagcgatcttaacgatcaagcgcggatcaaacggctttggaatgatgtattccggaccaaagctcagatcctgatcgccatacgcactagccaccacttcgctctgttccgcatgggcgagttctgcaatcgcacgtaccgccgccagtttcatctcttcgttgatggcggttgcgccaacgtccagcgcgccacggaagatgaacgggaagcacaggacgttgttcacctggttcggatagtcagaacgaccggtgcaaatgatggcatccggacgcacttctttcgccagcggcggcagaatttccggttccgggttcgccagcgccaggatcattggcgcacgagccattttcttcaccatttcctgggtcagcactttcgggccggaacagcccaggaaaatatccgcgccttcaatcacatcatcgagggtacgtttgccgtcatccaccaccgcatatgcggctttggtttccgccatgtttggctcacggccctgatagataacgcctttactatcgcaaaccacgatgttatgtttttgcagacccagcgctaccagcaggttcatacaggcgattgctgcggcacccgcgccggaaaccaccatccgcacgtcggagatgtttttctccaccacgcgcaagccgttgaggatggcggcagtgctgataattgccgtgccgtgctgatcgtcgtggaataccggaatattcatccgctcgcgcagtttctgttcaatatagaaacattctggcgctttaatgtcttcgaggttgatgccgccgaaggttggttcgagcgcggcgacaacttcaataaatttgtccgggtcgagttcgtcaacttcaatgtcaaatacatcaatcccggcgaatttcttaaacagaacgcccttgccttccatcaccggtttgcctgccagcgcgccaatgttgcctaaccccagcaccgccgtaccgttagagatcaccgccaccaggttacctcgggcggtatatttgtaggcttttaacgggtctttttcgatttcaagacaaggtgcggcaacgcctggactgtaggccagcgccagatcgcgctgtgttgccagaggcttggttggagaaacctggattttccctggaactggaaattcatggaaatcaagtgcactttgttttaactggtcatccatttggttgttcctttcacgtaacgttcacaaataaagtgtgtgggcaacagcccctgcccacaacgtggcgcacattattaccctgccggagtctacagactttgagcaagtccaaactctcaccattaatataatgttttggtaataatcctataacactgatgttacctgcttaatccagcaataccatgcctgtctgctatgcttttttgatgcgtttagcgaaatttctcagaagtgtgaattaacgcactcatctaacactttacttttcaaggagtatttcctatgaacgagttagacggcatcaaacagttcaccactgtcgtggcagacagcggcgatattgagtccattcgccattatcatccccaggatgccaccaccaatcctagcctgttactcaaagctgccggattaagtcaatatgagcatttaatagacgatgctatcgcctggggtaaaaaaaatggcaagacccaggaacaacaggtggtcgcagcgtgtgacaaactggcggtcaatttcggtgctgaaatcctcaaaatcgtacccggtcgcgtgagtacagaagttgatgcacgcctctcttttgataaagaaaagagtattgagaaggcgcgccatctggtggacttgtatcagcaacaaggcgttgagaaaagtcgcattctgatcaagctggctagcacctgggaaggaattcgcgcggcagaagagctggaaaaagaaggtattaactgcaacctgacgctgctgttttcttttgcacaggcacgggcctgtgcggaagcaggcgtttttctgattagcccgtttgtcgggcgtatttatgactggtatcaggcacgcaagccgatggacccgtatgtggtggaagaagatccgggcgttaaaagcgtgcgcaatatctacgactactataagcaacaccactatgaaaccattgtgatgggcgcgagcttccgtcgcaccgaacaaatcctcgccttaaccggctgcgatcgactgactatcgcaccgaatttactgaaggagctgcaggaaaaagttagcccagtggtacgtaaattaatcccaccttctcagacgttcccacgcccagctcccatgagcgaagcggagttccgttgggagcacaatcaggatgcgatggcggtagaaaaactgtctgaaggcattcgtctgttcgccgttgatcaacgcaaactggaagatcttcttgccgccaaactataaaccagccacggagtgttatatgtcccgaaaagaccttgccaatgcgattcgcgcactcagtatggatgcggtacaaaaagccaactctggtcatcccggcgcgccgatgggcatggctgatattgccgaagtgctgtggaacgattttcttaaacataaccctaccgacccaacctggtatgatcgcgaccgctttattctttccaacggtcacgcgagcatgctgctctacagtttgctacatctgaccggttacgacctgccgctggaagaactgaagaacttccgtcagttgcatagcaaaaccccaggccacccggagattggctatacgccaggcgttgaaaccaccaccggcccgcttggacaaggtttggcgaacgccgtcgggctggcgatagcagagcgtacactggcggcgcagtttaaccagccagaccatgagatcgtcgatcacttcacctatgtgtttatgggcgacggctgcctgatggaaggtatttcccacgaagtctgtagcctggcaggcacgctgggactgggcaagctgattggtttttacgatcacaacggtatttccatcgacggtgaaacagaaggctggtttaccgacgatacggcaaaacgttttgaagcctatcactggcatgtgatccatgaaatcgacggtcacgatccgcaggcggtgaaggaagcgatccttgaagcgcaaagcgtgaaagataagccgagcctgattatctgccgtacggtgattggctttggtagcccgaataaagcaggtaaggaagaggcgcacggcgcaccactgggggaagaagaagtggcgctggcacggcaaaaactgggctggcaccatccgccatttgagatccctaaagagatttatcacgcctgggatgcccgtgaaaaaggcgaaaaagcgcagcagagctggaatgagaagtttgccgcctataaaaaggctcatccgcaactggcagaagagtttacccgacggatgagcggtggtttaccgaaggactgggagaaaacgactcagaaatatatcaatgagttacaggcaaatccggcgaaaatcgctacccgtaaggctagccaaaatacgcttaacgcttacgggccgatgctgcctgagttgctcggcggtagcgcggatctggctcccagcaacctgaccatctggaaaggttctgttagcctgaaggaagatccagcgggcaactacattcactacggggtgcgtgaatttggcatgaccgctatcgccaacggcatcgcgcaccacggcggctttgtgccgtataccgcgacgttcctgatgtttgttgaatacgcccgtaacgccgcgcggatggcggcactgatgaaagcgcggcagattatggtttatacccacgacagtattggcctgggcgaagatggtccgacgcaccaggctgttgagcaactggccagcctgcgcttaacgccaaatttcagcacctggcgaccgtgcgatcaggtggaagcggcggtgggctggaagctggcggttgagcgccacaacggaccgacggcactgatcctcagtaggcagaatctggcccaggtggaacgtacgccggatcaggttaaagagattgctcgtggcggttatgtgctgaaagacagcggcggtaagccagatattattctgattgccaccggtagtgagatggaaattaccctgcaagcggcagagaaattagcaggagaaggtcgcaatgtacgcgtagtttccctgcccagcaccgatattttcgacgcccaggatgaggaatatcgggagagcgtgttgccttctaacgttgcggctcgcgtggcggtggaagcaggtattgccgattactggtacaagtatgttggtctgaaaggggcaattgtcgggatgacgggttacggggaatctgctccggcggataagctgttcccgttctttggctttaccgccgagaatattgtggcaaaagcgcataaggtgctgggagtgaaaggtgcctgatggtgattgccggatgctgattgccggatgcgacgctgacgcgtcttatccggcctacagcgtcttatccggcctacatgtcccgccattttgtttaacgggtgatccacaacgtgggccaggcgtctggcccatgccagttatcgcaggtgggttctgcggcgtaacgcaccaggcgaaaacgctgaccgtcaaagcgccagcgcgcctgaatgccacaatcgcttaatccgcgccctttcgctaaggtcaccagttcacggcttttctcatcaaatgttgcgttcatcagttccagttcattcgtctcctgaccgttgttgaacggcaaacgcaaccgaaccgggcggctagctagtggctttttacggctcacaatccatgccaaatcaatggtgttataggcccctgcctcacagctaatcatcatcagcgctttatcatcagtcagcgcagtgacattcacctcacgacgcaatggatcaaggctgcagcgcagaccattcatccgccagtttccataatccagcaaatcgttgcgttcttcgagactgagtggcgtcggcgttgggttaaccaccgcgacctctttcagcgcaggcgcgggcggtacgctgagcggcggttcgtcccctttcttgatccacgcggtttcactgccaacgcgcttttgctgagcatcaataaacaacaacgctgcttttaagccactcagagaaatggtctgatcgccatcgcgtaaggtgattgccttcccttcctgaatcatctgcaaaaacgcggtgatggttgccgtatcatcggttactaataaccatggactaatccgccacttgtcaccacttaacgccaacggctcgccatctaacagcagccgtggcgctatctccccttcactcgcctccgggctcttcaatccgccgcgctcaatacgtaaaacggcatcggtatgcgccccggcgctgcggctcagggtcatcaccagtccattatgatcgcccgtattacgcgccacgcagaaattttggttattacaggtgacctgccagtcggaaaacgcccgttgcgctggtgccgcccacaccaaagacgtcggcaacaaagcgaaaaaaaagagaaggaaaatgcgatagcgcatggacggtacgaccccagaagttcaaacaaacagcacaagtcgtatcttcgttgcgcaggtagcgcggctcaatcggatttgtcggattgagccaataataaacaacgaaatattattgttatttttcagtccattaaatgactcgtttgcaaatagttaagcaataacaccgtcttaccgtcacgtatctcgccggttttgatcatctccagcgcctggctgaacggcagctcgagcacttcaatatcttcatcttcgacaccgccaccggcgttagcgcgctgattgtcactgtattcggcgataaaaaagtggattagctcagtcacaccgcctgggctcatatacagttcaaataatttgcgcacttcacccacttcatagcccgtctcttcaatcgcttctttgcgaatacacacttccggttcgtcgttatccagcagcccggcgcagctttcaatcagctgcccgctttcattgccattaacccaggtagcgacacggaactgacgaatcagaaccacggtctttttcttcgtgttgtacaggaggatcgtcgcaccattgccgcgatcgtacacttcacgtttatggcggataacttcgccgtctttgcgcgtgagatcgtaagtaatgttgtgcagggtgaaatagttatcggagagaattttgtctttaatgagggtgatttgttgcgtcataccgactccacagcgcgaaatgaacaattatcttacgctgtgaagtcgggtttgtctgcgcaggctatcagtgagatttgacactttttacccccagccagtcaataatcccctgtgccgcatgacgtccttctgccattgcggtaaccaccagatccgcaccacgcacggcgtcaccaccagcgaagattttcggattggtggtctggtaacggtactggctttccacatccgcgatgatgcggccccatttgtctaccgttacaccgtggctctccagccacggcatcccgtgcggattgaagccaaacgccataatcaccgcgtcggctggcatgacaaattcactgccttccaccggcactggacgccgacgcccctgggcatccggctctccaagacgcgtgcgcaggaaacgaatcccgcagacgtgaccttgttcattcagctcaagcgccaccggctggacgttaaattcgaagttggccccctcttcgcgggcgttcttcacttctttcttgctgcctggcatgttagcttcatcacgacgataagcgcaggtgacgttactcgcgccgtggcgcagtgcggtacgcacacagtccatcgcggtgtcgccgccgcccagtaccacgacgttaagtccggcggtattgataaacggctcttccggtagctcttcgagccccatcacctgtttagtgttggcaatgaggaacggcagcgcgtcataaacgcccggcgcatcttcattgggtaaacccgctttcatggaacggtaagtgcctacgccaacgaagaccgcgtcgtattgttccaaaaggctatccaaagagacatctttacccacttcacaattgagttcgaagtgaatccccatcgcgctgaagatttcccgacggcgtgccagcagggatttatccagtttgaaagaaggaatgccgaaagtgagcaagccaccgatttctggatggcgatcgtacaccgtcacccccacgccattgcgggtcagaacatccgcacaggccagccctgccggacctgcaccgataatcgccacccgcttgtccactttggtgacatggcttaagtcaggacgccaacctttcgccaacgcctgatcactaatgtagcgttcaatgttgccgatagttaccgcgccgtgctcatcgcgaatagtacaggcaccttcacacaaacggtcttgcggacaaacgcgtccggtaatttccggcagggtgttggtctggtgagaaagctcgacggcggcgtcgatgtttccggctttcaccagttcaatccactgcggtatatggttatgcagcgggcaggtccattcacaaacgctgtgctcgccgcacttaaggcagcggctggcttcccgttgtgcctggtcggcgcgaaatggcagataaatttcatcaaaaccggttttgcgcgcttcaatcgccagtttatccgactcgccacgcgcgggcgttgcctgcatttgttcgactttactcattaccggcatttcttgcgccgcggtactggcatgccacggttgatgttcctgacgcgcggtgcgcaagcggcgggatttcgccatgccggagagtgcgacgtcagtgaccagttgcagcgcgtccgccgggcaattctcaacacaggcaggaccgttttcgcgccccgcacaaaggtcgcatttatgcgccgtggcttttacttttcctgccgcgacgggtgtcaggacgatttgcatcgtaccaaaaggacaggccaccacgcaggatttacagccaatacacttttgctgattgacctgaatgctgtcatcaacgtggctgattgcgccattagggcagctacgggcgcagggcgcatcttcacaatggtgacaggtcactgcactacgttgctgttgatgtttgataaccgtaattcggggatgaaaatggtgttggctcaggacatgttgctcatcattgtgagccatgacacaggcgatttcacaagcatgacaacccagacattgctgactgttggccataataaaacgattcataacgaccttcttttttggttgtaaaaaccttattctttatatgagtgttgttattacccgacttacaggggaatcggcaatgttcatgtgcccagaataagtaactatttcgctataaactgtggcagatcaaataatcccatcactgactaaattgcgtttcagcgaactggaacattaatgattttttgtggagaagacgcgtgtgattgttaaacgacccgtcagcgccagtctggcccgggcctttttttacattgtgctgctgagcattctttccacgggtatcgctctgctaactctggcgagcagtttgcgcgacgctgaggctatcaatattgccggaagcctgcgtatgcagagttaccgcctgggctacgacttgcaaagtggcagtccacaactcaatgcacatcgccagttatttcagcaggcactgcatagtccggtattaaccaacctcaacgtctggtatgtgccagaagcagtaaaaactcgctatgcgcatctgaatgccaactggctggagatgaataatcggctcagcaagggcgatttgccgtggtatcaggccaatattaataattatgttaatcagatagacctgttcgtactggctttacagcactacgctgaacgcaaaatgctgctggtggtggcgatttccctggctggcggcatcggtattttcacgctggtcttttttactttgcgccgcatacgccatcaggtggttgccccgctgaatcagctggttaccgccagtcagcgtattgaacacgggcagttcgacagcccgccgctggataccaacctgccgaatgagcttggtctgcttgcaaaaacctttaaccagatgagcagcgagctgcataaattgtaccgtagcctggaagcgagtgtagaagaaaagacccgcgatctccacgaggccaagcgtcgtctggaggtgttgtatcagtgtagccaggcgctgaacactagccagattgatgtgcattgtttccgccatattttgcagattgttcgcgacaatgaagcggctgaatatctggagttaaatgtcggtgaaaactggcggattagcgaagggcaaccaaacccggaattgccgatgcagattttaccggtgacaatgcaagagacggtttacggcgaactgcactggcaaaatagtcacgttagtagtagtgaaccgctgcttaacagcgttagcagcatgctgggacgcggtttgtactttaatcaggcgcagaagcattttcagcaattattgttgatggaagaacgtgcgaccatcgcccgcgaattgcacgacagcctggctcaggtactttcttacttacgtatccagttgacgttactgaagcgtagcataccggaagataacgccaccgcacaaagtatcatggccgatttttcccaggcgttgaatgatgcttatcggcagttacgcgagctgttgactactttccgcctgacgctgcagcaggcggatctcccctccgcattgagggaaatgctggatacgttacaaaatcaaaccagcgccaaactgaccctcgactgccgtctgccaaccctggcactggatgcgcaaatgcaggtgcatttgttgcaaattattcgcgaagcggtgctgaatgcgatgaagcacgccaacgccagcgaaatcgccgtcagttgcgtcaccgcgccggacggcaatcacacggtttatatccgtgataacgggattggtatcggtgaaccgaaagaacccgaaggtcattatggtctgaatatcatgcgcgaacgcgcggaacggctaggtgggacgctgacttttagtcaaccttccggcggcggcacgttagtgagtattagctttcgctctgcggagggtgaggaaagtcagttaatgtaatgcctcctactgaccaaagaatacttgcacttaaggttcagtataaaagggcatgataatttacattaactcctttttttctccacgattggctcgtaccttgccgctacagtgaagcaagtcaagcctacaacgatacgcagaaacacgaggtcctcttttaatggcgaatttctttattgatcgccccatttttgcctgggtgctggcaatcctgttgtgtctgacaggtaccctggcgatttttagtttgcccgttgaacaataccccgatctcgcgccaccgaatgtgcgagtgaccgctaactatcccggcgcaagcgcccagacgctggaaaacaccgtgacccaggttatcgagcaaaatatgaccggcctcgataatctcatgtatatgagttctcagagcagtggcaccggtcaggcatctgtcactttaagttttaaagcaggcaccgatccggacgaagccgtgcagcaagtacaaaaccagctgcaaagtgccatgcgaaagttaccgcaggcggtgcaaaatcagggcgtgacggtgcgtaaaaccggcgataccaacattctgaccattgccttcgtctctaccgatggtagcatggataaacaggatattgctgattatgttgccagtaatattcaggacccgttaagccgcgtgaatggcgtcggggatatcgatgcctatggtagccaatattccatgcgtatctggctggacccggcgaaactcaacagtttccagatgacggctaaagatgtcactgatgccattgagagtcagaacgcgcagattgcggttgggcaacttggtggtacaccttccgtcgataagcaggcgctcaacgccaccattaacgcccagagtctgctgcaaacaccagaacagttccgcgatatcaccttgcgggtcaatcaggacggcagtgaggtaaggctgggcgatgtcgccaccgtcgaaatgggggcggagaaatacgattatcttagccgcttcaatggtaagccagcctccgggctgggggtaaaactggcctccggcgctaacgaaatggcgacagcggagctggtgctcaatcgtctcgacgagctggcgcagtatttcccgcatggactggaatacaaggtggcgtatgaaaccaccagctttgttaaagcctccattgaagacgtggtgaaaacgctgctggaagctatcgctctggttttcctcgttatgtatctgttcctgcaaaacttccgcgccacgctgatacccactatcgccgtgccggtggtgttgatgggaaccttctccgtactttacgccttcggttacagcgtcaacaccttaaccatgttcgcgatggtgctggcgatcggtctgctggtggatgacgccatcgtggtggtggaaaacgtcgaacgtattatgagtgaggaaggactcactcctcgcgaagccacacgtaaaagcatggggcagatccagggggcactggtcgggattgcgatggttcttagcgcggtatttgtaccaatggccttcttcggcggcaccaccggtgccatctatcgccagttctctattaccattgttgcggcgatggtgctgagtgtactggtagcgatgatcctcactccggctctgtgtgccacactacttaagccactgaaaaaaggtgagcatcatgggcaaaaaggcttttttgcctggtttaaccagatgtttaaccgcaacgccgaacgctacgaaaaaggggtggcgaaaattctccaccgtagcctgcgctggattgtgatttatgtcctgctgcttggcggcatggtgttcctgttcctgcgtttgccgacgagcttcttaccgctggaagaccgtggcatgtttactaccagcgtacagttgcccagcggtagtacgcaacaacagaccctgaaagtcgttgagcaaatcgagaaatactacttcacccatgaaaaagacaacatcatgagcgtgtttgccaccgttggttctggccctgggggtaacgggcaaaacgtggcgcgaatgtttatccgcctgaaagactggagcgaacgcgacagtaagaccggcaccagctttgccattatcgagcgtgcaacgaaggcgtttaaccaaattaaagaagctcgcgttatcgccagcagcccgccagcaattagcggtcttggtagttctgcaggttttgatatggagttgcaggaccacgctggagcgggtcacgatgcgctgatggcagcacgtaatcagttgctggcgctggcggcggaaaacccggagctaacccgtgtgcgccataacggcctcgacgacagtccgcagttgcagattgatatcgaccagcgtaaagctcaggcgctgggcgttgctatcgacgatattaacgacacactgcaaaccgcctggggtagcagctatgtgaatgactttatggatcgcggtcgcgtgaagaaagtctatgtgcaggcagctgcgccgtatcgcatgctgccagatgacatcaatctctggtatgtccgaaataaagatggcggcatggtgcccttctctgctttcgcgaccagtcgctgggaaacaggcagcccgcgtctggaacgctataacggttattctgcggttgagattgttggggaagccgcaccgggggtcagtaccggtacggcgatggatattatggaaagcttagtgaagcagctgccaaacggctttggtctggagtggacggcgatgagctatcaggagcggctttccggcgcgcaggctccggcgctgtacgccatttccttgctggtggtattcctgtgtctggctgcgttgtatgaaagctggagcgtgccgttcagcgtaatgctggtcgtgccgctgggggtaatcggcgcgctgctggcaacctggatgcgcgggctggaaaacgacgtttacttccaggtgggcctgttaacggtcattggtttaagcgcgaaaaacgccatcctgatcgtcgagtttgctaacgagatgaaccaaaaaggccacgacctgtttgaagcgacgctccacgcctgccgtcagcgtttacgcccgattctgatgaccagcctggcatttatcttcggcgtattgccaatggcaaccagcacgggtgccggttccggtggtcagcatgcggtgggtactggcgtaatgggcgggatgattagcgccactattctggctatttacttcgtgccgctgttctttgtgctggtgcgccgccgcttcccgctgaagccgcgcccggaataagcaataaaaaaggcgacatgccaatgtgtcgcctttttcaactttccgattaagaacctgctcagcgggttcttgctgtttgtactttgtctcaggaattacttacgaagcataacttcgataaagtctttccagttccccagttcacgttcaatcataacaacctctcttataattatgggtattctacggaaacaatataccgtggtgaagctaatttactcgattgctgcgatgactacctccgggggacaaatcttatgtaaatactatggtcctgcggtgatgatttgtatgtgatacacagcaacatttcgagatattcatacggcatctaatactgatttaattctggttaaaatacagacagataacaagatgaatattcttaatgtttacgttaaaaatgtttaatattatttaatagttgttaatttgaatacttcgataatgttatatttcctgataatcatttgcaggcaaaatgttttcacccttaaatgagtatttattctcataaatcgaaaaaggattcattatggttacactttacggtatcaaaaattgtgacaccattaaaaaggctcgccgttggctggaagccaataacatcgactatcgttttcatgattaccgcgtcgatgggctggacagcgaattattgaacgattttatcaacgaattaggctgggaagcgttactcaacacccgtggtacaacctggcgtaaactggacgaaaccacccgcaataaaatcaccgatgcggcctctgcggcggcattaatgactgaaatgcctgcaattatcaaacgtccattgctctgcgtgcccggtaagcctatgctgctgggtttcagtgattccagttatcagcaatttttccatgaggtgtaatctatgagctgcccggttattgagctgacacaacagcttattcgccgcccttccctgagtcctgatgatgcaggatgccaggctttgttgattgaacgtttgcaggcgatcggttttaccgttgaacgcatggactttgccgatacgcagaatttttgggcatggcgtgggcagggtgaaacgttagcctttgccgggcataccgacgtggtgccgcctggcgacgccgatcgttggatcaatcccccgtttgaacccaccattcgtgacggcatgttattcgggcgcggtgcggcagatatgaaaggcagcctggcggcgatggtggtggcggcagaacgttttgtcgcacaacatcccaaccatacggggcgactggcatttctgatcacctctgatgaagaagccagtgcccacaacggtacggtaaaagtcgtcgaagcgttaatggcacgtaatgagcgtctcgattactgcctggttggcgaaccgagcagtatcgaagtggtaggtgatgtggtgaaaaatggtcgtcgcggaagtttaacctgcaaccttaccattcatggcgttcaggggcatgttgcctacccacatctggctgacaatccggtacatcgcgcagcacctttccttaatgaattagtggctattgagtgggatcagggcaatgaattcttcccggcgaccagtatgcagattgccaatattcaggcgggaacgggcagtaacaacgttattccgggtgaactgtttgtgcagtttaacttccgcttcagcaccgaactgactgatgagatgatcaaagcgcaggtgcttgccctgcttgaaaaacatcaactgcgctatacggtggattggtggctttccgggcagccatttttgaccgcgcgcggtaaactggtggatgcggtcgttaacgcggttgagcactataatgaaattaaaccgcagctactgaccacaggcggaacgtccgacgggcgctttattgcccgcatgggggcgcaggtggtggaactcgggccggtcaatgccactattcataaaattaatgaatgtgtgaacgctgccgacctgcagctacttgcccgtatgtatcaacgtatcatggaacagctcgtcgcctgatgagtggttctgcaagaggaaataagcatggactggctggctaaatattggtggattctggtgattgtctttttggtaggcgtcctgctgaacgtgattaaagatctcaagcgcgtcgaccataagaaatttctcgccaacaagccggagcttcccccgcatcgtgatttcaacgataagtgggacgatgacgacgactggccgaaaaaggatcaaccgaagaagtaagctgagtgctcaaccgtaggccggataaggcgttaacgccgcatccggcaatggtgaacgatgcctgatgcgacgctcacgcgtcttatcaggccaggtaatctgtcttttacatcatttcaatcacatcatcatcgccaggcttaccgccacttagcgcttcgtcgaaataatgtttcggaatggtataacgcaagtgatccagggcaaattgcatactgcgattgtcgatcgcatggcctaaatcctccacgatatccagcgtcacgtcaccaccggcactgattaacgcttcctgcgccgcaaccgcatgcgccagatcgataaccggatcttcaccgccatgaatcaggtgaattgtcgtggctgtagacgcagtttccggcaggctcgcatagcgtccgttaaaagcaatgacgcgactagcaaggcccggttcggctttaatgctctccagcaccataatcgcgccttgagagaaaccgatgagcgccgtggcgttagcccctactccgctctgtttctgccagtagcgcaccgtttcaataaacgtcggcatgatcgcatccacacgcgcctggcgattatcttccgtaataccctgcacgctaaaccactgacgccccgccggattaccgctcggctccgcgccaccgacactcaccaccagcgcatcaggaaacagcggtgcaaaccagttgcctatttcccccattgccaccgggttatccccgacaccgtggaaaagcagtaacaactgttgcgcaggtttatccgggctttgaacaacaaaatggtcatgtttcatggcgaactccttaactgatgtcattaattttacgccgctgactcacaatgaccatgagataaaattgaaggagtcagtgaaataattgccattgcgttatgcgatcgcgcagacgctcagtgcgaacatcattaagtgcgaacagcgcctgcgcggcctcttcccgctgacggaccagtaacatcttgcggccactaagtttaagtgtggtacataactgcgcatcactggcgtttttctgtaaacgcccacgcagcgccggtaatgccagttcactggtttgtaacagacgcaataagcaacctaagctcgttaatagcggacgatgagcgaaagcaaaaccggccagttcaagccagtcgtcgtcagaaaggacggcatcgtttagtggatcaacaggaagcgtttcgccattccactgcgcgagagcttgcgcatcgcgacgtaaacggtaatgctcacgttcagccagctgtttacccgcatcactcatcggtaacagcgccatcgccgtatagcaaccgctgctggcttcccgatgattacccatccgcaccagcacaaaaccgcagcgttgccagaaacgccataactccccggtgtaaccaaaactcacgctaagatagtcgaggtcttgcgtatattgcaaagcaccagcaataagttgccgccctgtgccttcccgctgacgagccggatgaactgctatccggctgacccgccgtccacgcaatgtcgccgccagtggattgttgccgtgcgccgccaggctctgggccaccagattaccccgcgggcgacgaaaacctgcccataccgcctgactgagttgttgagataatccaccctcatccaccagccacagcgccccggcaatctcgttttcgccagccgcctgtaaaaaatgttgccctggtgcatccatcatccggcgtaaatccagcgggctagtccgatagtgcgcaccagacaagagctgataaacctttaacggcgtttctggatcgctttgccataacgtctgttcaaatgcggaaatgacaatattgccttgtggtgtatgggtgaagttttcatcgtcaaaaaccagtgcctcgctgaccattttttccagcgggcatccctgcgcccagcggatcggctgttgcagttcaaaacggtgtaaatgcggaaagcgagcgcaaaatttcagcaaaaaaccacgtccggtgccttcgtagccctgcaccgtagtggttaacaacgttcgaggaaaacggcttaccagttgatgcaacaatggcgcaggtatggctgcggcttcatcgaccaccagccagtcggcttgctcatcgctggctaacaaggcatccggcgcaataaagcgaaacttctcgcccgcaaattgtgccagtacatccgtactcgcttttgcgggcgcggtgacaatcgctctgcccgcaatacgagaaatgagttgccctgccaacgcgctcttaccgcgcccacgcgcagccgttaccgctgccacgcccggcggcatggtcattagctgctttaagagttgctgttgttctggttgtggtgcgccagtcgcggggtaccagtcagtacggggagtaaaatgcgccaagctgaatggctggttttgccgccagaggatagcctcgttatccgccgtaagtacgcgtttgagatgctggacaaaatgcggcgtcgcaatagggtcagggcaatcactccagcgcaggctgtcggcatcaggttggttttcccactcttcccatacagggagtaacaaaaccagccagcttcccgctttcaacgttccgctaagtgcggcaaaggcagcggcatcaaagccgtggcgggcgtcgaataccgcatgccggaactcgcgcccaagtaaagtttgtagtgcgctgggagaacagtggttttcagcatctggccgcgggctaatccacagccagtcgccaggtaaggcatcacgcaacttaagagtatgctcaaaacaccaaccctcttccccgctcaacaccagcaagcggcggatcccttcacgtttcatttgcgctgttaatgtgtgaagcgcagtcagttcagccatccctgccccggaagttaaatgcttttaccaaaagtattgcattgtgccggatcgccgctgtcgaaaccacgtttaaaccagctgtagcgttgctgagaagtgccatgagtgaaactgtctggtactactcgcccctgactttgctgttgtaaacggtcatcgccgatggcctgcgccgcgttcagcgcctcttccagatcgccggtttccagaacgccttgctgctgcatactatgcccccagacaccggcaaaacagtcggcctggagttccatacgcacagataagcggtttacttccgcctgcgtcgcgttttgttgcagttgacgaactttcggctcgatgcctaacagtttctgcacatgatgaccgacttcatgggcgataacgtacccctgggcaaaatcgccatccgcgccaagtttgtctttcatgtcatcatagaaggagagatcgatataaaccgtgccatccgccgggcaatagaacggccccattatggactggcccgccccgcagccggtacgcgtcattccacggtacatgaccagcttcggttgctgataggtcttacccatcttctcgaactgttgtccccaggtgtcttccgtggttgccagaatcacgctggtgaattttgcggcttcgtcttcatttgggctaatactccgcgtactttgttgttgggaaaccggctgcccggtcatcaacccggttaaatcaacaccatagtagcctgcaaccagcacgactatcagtaaaatcagcccgcctttaccgcttggcaggcgaaaaccgggaccgcccatagatggaccaccagagctgttgcgcctgtcttcaacattgtcactttcacgtcgcccttgccaacgcatagatacctcaacaatatattcattatagaaatgatcgtaggtggttcagaggaagattaccacaggaaagcgggatgaaatggcggaggaatgagcgttcaatgcatatattccgagagcggttgtcttgccgtgccagctgcacggcaagatgatgaacagaaaaatcagtccagctgtacacccaggcggcgggcgacggcttcataggcttcgatcaggccaccgaggctctggcggaaacggtctttgtccattttctccagcgtttctttgtcccacaggcggctaccgtccggggagaactcatcacccagtaccacttcgcctttgtacagaccaaattccagcttgaagtcgaccagaatcagaccagcatcatcgaacagttttttcagcacgtcgttcgctttgtaggtcagctctttcatacgcgccaggttctctttgctcacccagccaaaggtttcgcagtaagattcgttgaccatcggatcgtgcatggcgtcgtttttcaggaacagatcgaacagcggcgggttcagctcaataccttcttcgattccaagacgtttcaccagagagccagcagcacggttacgcacgacacactcaaccggcaccatatccagctttttcaccagacattcggtatcggagagcagacgctccatttgagtcgggatacccgcttcagccagtttgctcataatgaagtagttgaacttgttgttcaccatacctttgcgatcaaactgctcaatgcgcgcgccatcccctgcactcgtatcattgcggaattcgagcaccaacaggtccgggttttccgtgctgtatacggttttcgctttaccacgatacaactcagcttgcttttgcatctttatcactcctgggtgtgaattaacgttttaaaatcttttgctgtctggtgtgccggatgttttgtcggatgcggcgtgaacgccttatccgaactacgtccgacaaacaaatttcgtgcgaattaccgctaaaatcgcgttttcctgcagacgcacacgtttgcgtatcatatcagaaaaaagggccggatgattccagccctgtatttttacttgctaaacgcagcctggaagacagctaccagcgcgtcgttctgactctgagtcagagtatgacctttcggatcgatgaactgtaggctgctgcggttatctaaatcgccaacctgcagtttatagtcaccggatgccaggcctggatcgctcgcgcccagttcctgccagtcgctgtcagacagcggcttataagttacggccatgttgccctggctacgggtgctgtcggtcactttcatgcccactttttccagcgccgctggcagacgttgccaaaccacattgaacggcccgcgtacgaccagcattggtaaaccggtgtcatcagctgcactttgtacgtccatagtggtggaggcacgattttgcgcagcgttcgcggcgtcagtggcagatttatccagaccggcggaaataacgttcatcatctccgtgctgtaacgctgcatggaagccgcgtctgcaaccggtttgcccgcctgttccaggttcagcagtttaaccgtaaccgcctgctgataaccctgcggcttaacagagatttgataacgaccacgatactgctcgtcttcgtccagacggttccattgtacccaatcggtggtcagtgtctgaccagcatcatcacgttgggtgatggtgtagtttttcgcctgcagcacgctaaccacctgcggccacagagtattgccacgaccattttccaccagcaaactagcggtatcgcccgtgaactgggtacgcgcgccagaaaccagtgccagcggctgggctggtggacgaatgtccagcgccttaccgacagcaccactaccgttggtcaccgggattgcataatcaccggaggtcaccggcaaaatcattccagccggggcatgaagctccgcaagcggtgccgcttccaggtaggcttcatcaccactgacctgacgcttatagcgactgtcagaactacaggcagcgagtaataaaacaaggctaacacccgcaacctttgccaggcggctcttttgaacagagtaagccatcaaatctccctaaactttacagcaaaccggcatgcttaagcgccgctctgaccgtctcacgaccactgtcggtgattggtgtcattggcaggcgcagcgtatcggtcgccacaagacccagttccttacatgcccatttcaccgggattggattgggttcgacaaatagtttgttgtgtaatggcatcagacgctgattaataacgcgtgcctcggcaaaatgcccttctgctgccagtttgcacatctgggccatatcacgcgctgcgacgttagccgtaacggaaataaccccatgaccgcccaattgcatgaagtccagcgcgctcgcatcatcgccgctcagcagaacaaaatcatcactaaccagctctttgatctggtttacacgcgttaagttccctgttgcctctttgattccgataatattttttactttcgccagacggcccaccgtttccgggagcagatcgcagccagtacgggacggcacattatacagaatttgcggcaggtcagtatgctcagcgatggctttgaaatgctgatacaaaccttcttggctcggacgattgtagtaaggggttaccgtcaggcagccgacgataccactgtcattgaagcgctgcgtcaggctaatggcttccgcagtagcgttagcgccggtcccggcaattaccggaatgcgcccatcagccagatccagcgtcatcatcaccacatcagcatgttcgtcatgatttaaggtagcggactcgccagtggtgccaacagaaacgatcgcgctagtaccgctggcgacatgataatcaatcagttttttcaagctagcccgacagacattacctttttcatccatcggagtaacaatcgcgacaatacttcccgtgaacatgggccatcctctgtgcaaacaagtgtctcaatggtacgtttggtatggcattaaaagcaagcagacagaaccgttctgattgttgtatgcatgtttttttatgctttccttaagaacaactcaccccttaaaggaataaccagtttgacactgagtagccaacattatctggtgatcactgcgttgggtgccgatcgccctggaattgtgaacaccatcacccgtcatgtcagtagttgcggctgtaatattgaagacagtcgcctggcgatgctgggagaagagttcacgtttattatgctgctttccggtagttggaatgccattactctgattgaaagtacgttaccgttgaaaggtgccgaactggatcttttaatcgtgatgaagcgcacgacggcgcgtccgcgtccgccaatgccagcatctgtctgggttcaggtcgatgtggcagactccccgcatttaattgaacgcttcacagcacttttcgacgcgcatcatatgaacattgcggagctggtgagccgcacgcaacctgctgaaaatgaacgggctgcgcagttgcatattcagatgaccgcccacagccccgcatctgcggacgcagcaaatattgagcaagcgttcaaagccctatgtacagaactcaatgcacaaggcagtattaacgtcgtcaattattcccaacatgatgaacaggatggagttaagtaatgaatccactgaaagccggtgatatcgcaccgaaatttagcttgccggatcaagacggagaacaagttaatttgaccgacttccagggacagcgtgttctggtttatttctacccgaaagccatgacccccggctgtaccgtacaggcctgcggcttacgcgataacatggatgagttgaaaaaagcgggcgttgatgtgctgggtatcagcaccgataaacccgaaaaactctcccgttttgcggaaaaagagctgcttaactttacgctcctgtctgatgaggaccaccaggtgtgcgaacaattcggcgtctggggtgaaaagtccttcatgggcaaaacctacgatggcattcatcgcatcagcttcctgattgacgctgatggcaaaatcgaacatgtctttgacgatttcaaaaccagcaatcaccacgacgttgtgctgaactggctgaaagaacacgcctgattactttgctccattccgtgctggctgcgcttgcggccagcatacctcacttctcgtgatcaagatcacattctcgctttcccctgcgacacgggtgtcgaatccattttttgctgaacgttaatgaccatcatttttgtaccgttcagaatccagttaatacataacttattgaatatattgagttaatcagaatggcatcctttatgcaatatgaaatgcaatgtttcatatcattttcaaggagccgacatgaaccgctttgtggtggccgaaccactgtggtgtacaggatgtaatacctgtctcgctgcctgtagcgacgtgcataaaacgcaaggtttacagcaacacccgcgcctggccctggcgaagacgagtacaatcactgcccctgtcgtgtgtcatcactgtgaggaagccccttgcctgcaggtctgcccggtcaatgccatctctcagagggatgatgcgatccaactcaacgaaagcctctgtattggctgcaagctttgcgccgtggtctgcccatttggcgcaatcagcgctagtggaagccgtccggtgaatgcccatgcgcaatatgtttttcaggctgaaggcagtctcaaagacggcgaagaaaacgcgccaacacaacatgctttgctgcgctgggaacctggtgtccagaccgtcgcggtgaaatgcgacctgtgtgatttcttgccagaaggtccggcctgcgttcgcgcttgcccgaatcaggcgttacggctgatcaccggtgatagcctgcaacgtcagatgaaagaaaaacagcgccttgccgcaagctggtttgccaatggcggggaggatcccctttccctcactcaggagcaacgctaatggatgccctgcaattattaacctggagcctgattctctatctgtttgctagtctggctagcctgtttttactcggcctggacagactggctattaagctttccggcatcacaagcctggtgggcggcgtgattggcatcatcagcggaattacgcaattacatgctggtgtaactttagtcgcccgttttgcccccccttttgaatttgccgatttaaccctgcgaatggatagcctcagcgcatttatggtgctggttatctccttgctggtggtggtttgttctctctatagtttgacttatatgcgcgaatacgagggcaaaggcgcggcggcgatgggcttctttatgaatattttcatcgcaagcatggttgccctgctggtgatggacaacgctttttggttcatcgtgctgtttgaaatgatgagcctgtcttcctggtttctggtcattgccaggcaggataaaacgagcatcaacgctggcatgctctacttttttatcgcccacgccggaagcgtgctgataatgatcgccttcttgctgatggggcgcgaaagcggcagcctcgattttgccagtttccgcacgcttagtctttctccggggctggcgagcgcggtgttcctgctggcctttttcggttttggcgcgaaagccgggatgatgccgttgcacagctggttgccgcgcgctcaccctgccgcaccaagccacgctagcgcgttgatgtctggcgtaatggtcaaaataggtattttcggcatcctgaaagtagcgatggatctgctggcgcaaacgggtttgcctctgtggtggggcattctggtgatggcgatcggcgcaatctccgcgctcctgggcgtgctatatgcgctggcggaacaggatatcaaacggctgctggcctggagtaccgtcgaaaacgtcggcattattttgctggcagtcggtgtggcgatggtcggtctgagtctgcacgacccgctgctcaccgtggttggactgctcggcgcactgtttcatctgctcaaccatgcgctgttcaaagggctgctatttctcggcgcgggagcgattattagccgtttgcatacccacgacatggaaaaaatgggggcactagcgaaacggatgccgtggacagccgcagcatgcctgattggttgcctcgcgataagcgccattcctccgctgaatggttttatcagcgaatggtacacctggcagagcctgttcagtctaagtcgtgtggaagccgtagcgctacaacttgcgggtcctattgctatggtaatgctggcagtcactggtgggctggcagtaatgtgcttcgtaaaaatgtacggtattactttctgtggtgcgccgcgcagtacacacgctgaagaggcacaggaagtgccaaatacgatgatcgtcgccatgctactgctcgcggcactctgcgtattaattgcgcttagtgccagttggctggcaccgaagataatgcatattgcccatgcgtttaccaatacccctcccgccactgtcgccagcggaatagcacttgtacccggcacgtttcatacacaggtcacccccagtttactgttgctgttactactggcgatgcctttgctgcctggcctttactggctgtggtgtcgtagccgccgcgcagcgtttcgtcgcacaggagatgcctgggcatgcggctacggctgggaaaatgcgatggccccgagtggcaatggcgtgatgcagccgctgcgtgtggtcttttctgcgctatttcgtctacgacaacagctcgaccctacgctgaggctaaataaaggtcttgcgcacgtcaccgccagggctcagagcacagaacccttctgggatgagcgggtgatccgccccatcgtgagcgccacccaacggctggccaaagaaatacagcatctgcaaagcggcgactttcgtctctattgcctgtatgtggtcgccgcactggttgtgctgctaatcgctattgccgtctaaggaaatcaccatgagacaaactctttgcgacggatatctggtcatttttgcgttagcacaggccgtgattctgctgatgctaatcccactttttacgggtatttcccggcagatacgcgcgcgtatgcactcccgccgcgggccggggatctggcaggattatcgcgatatccacaaactgtttaaacgccaggaagttgcgccgacatctagtggtctgatgttccgcctgatgccgtgggtattaatcagcagcatgctggtgctggcgatggccttaccactgtttattaccgtttccccttttgcgggcggcggcgatctgatcacccttatctatcttcttgccctgtttcgttttttctttgctctttccgggctggataccggaagtccgtttgcgggagtcggtgccagtcgcgagttgacgctcggcattctggtcgaaccaatgcttattctcagtctgctggtattggcgctgatagcaggttccacgcatatcgagatgatcagcaatacgctggcgatgggctggaacagcccgctaaccaccgtactggcgttactggcctgtggttttgcctgcttcattgagatgggaaaaattccctttgatgttgctgaagcagaacaggaattacaggaaggcccgctgaccgaatattccggtgccgggctggcgctagcgaaatgggggctggggctgaaacaggtcgtgatggcaagtctgtttgtggccctgtttctgccctttgggcgcgcgcaagaactttctctcgcctgcctgctgactagtcttgtcgttacgctgctcaaggttttgctgatttttgtactggccagtatcgcagaaaacacgctggcacgcgggcgttttttactcattcaccatgtgacctggcttggcttcagccttgctgcgcttgcatgggtcttctggttaaccggtctgtaaggagcactgacggaatatggaaaatcttgctctgacgacgttattgctgccttttatcggcgcactggtcgttagctttagcccacaacgtcgggccgccgaatggggggttttgttcgccgcgctgaccacgctgtgcatgttgagtctgatctccgcgttttatcaggccgataaagttgccgtcacgttgacgttggtcaacgtgggggatgtggcgttgtttggcctggtcattgatcgcgtgagtacgctgattctgtttgtggtggtgtttctcggtttgctggtcacgatctactccacgggttatctgacggataaaaatcgcgaacacccgcataacggcacgaatcgttattacgcatttttactggtgtttatcggcgcgatggcgggactggtactctccagcacgctgctcggtcagttgttgttttttgaaattacaggcggctgctcctgggcgttgatcagttattaccagagcgataaagcgcagcgtagtgcactaaaagcgttacttatcactcatatcggcagcttggggttgtatcttgccgccgccacgctgtttttgcagaccggaacgtttgcgcttagcgcgatgagcgagttacacggcgacgcacgttatctggtttatggcggcatcctgtttgccgcgtgggggaaaagcgcccagctaccgatgcaagcgtggctaccggacgcaatggaagcgccaacaccgatcagcgcctatctccacgccgcaagcatggtgaaagtgggcgtttacatttttgcccgcgctattatcgacggcggcaatatcccgcatgtgattggcggcgttggcatggtcatggcactggtcaccattctttatggctttctgatgtatttgccacagcaggatatgaagcggttgctagcctggagcaccatcactcaacttggctggatgttcttcggcttgagcctctccatcttcggcagccggctggcgctggagggcagcatcgcctacatcgtcaaccacgcgttcgctaaaagcctgtttttccttgtagcaggtgcgctgagttacagctgcggcacgcgcttgttgccgcgtctgcgtggcgtattgcacaccctgccgttgccaggcgtgggtttctgcgtggcagcgctggcgattaccggcgtgccgccgttcaacggcttcttcagtaaattcccgctgtttgctgccggttttgcgttgagtgtggagtactggatcctgctgcccgccatgattcttctgatgattgaaagcgtcgccagtttcgcctggtttattcgctggtttggtcgcgttgtgcctggcaaaccgagcgaggccgtcgccgatgccgcaccgctgccaggaagtatgcgcctggtgttgattgtactgattgtgatgagcctgatttccagcgtaatcgccgcgacctggttgcagtaaggagatgatgaatgaccggttctatgatcgtaaataatctggcgggactgatgatgctgacaagcctgtttgtgattagcgtcaaaagctatcgcctgagttgcggattttacgcctgccagagtctggtgctggtgtctattttcgccactctcagctgcctgttcgccgcagagcaactgctgatctggtccgccagcgcctttatcaccaaagtgctgctggtaccgttaatcatgacttacgctgcacgaaatattccccagaacatcccggaaaaagcgttattcggtccggcaatgatggcactgctcgcggcgttaattgtcctgctttgcgcatttgtcgttcagcccgtgaagctaccgatggctaccgggctgaaaccggcgctggcggtagcgttaggtcattttctgcttggcctgctgtgcattgtcagccagcgcaatatcctgcggcaaatttttggttactgcctgatggaaaacggctcccatctggtgctggcgcttcttgcctggcgagcaccggaactggtggaaataggtatcgctaccgacgccatcttcgccgtcattgtgatggtgttactggcaagaaaaatatggcgtacccacggcacgctggacgtgaacaacttgaccgcgctgaagggataatgagatgagttattctgtgatgttcgctttactcctgctcacgccgctgctttttagcctgctctgttttgcctgccggaaacggagactttctgcgactcgcacggtgaccgtattacatagcttagggatcacactgctgctgattctggcactctgggtggtccaaactgccgctgatgcaggagaaatattcgctgcgggactgtggcttcatattgatggtctgggcggtttgttcctcgccattcttggtgtgattggctttctcaccggtatttacagcattggctacatgcgtcatgaagtggcacacggcgagcttagtcccgttacgctgtgcgattactacggtttcttccatctgtttttgttcaccatgctgctggttgttaccagcaataacctgattgtgatgtgggcggcgatcgaagccaccaccttaagcagcgcgtttctggtaggcatttacggtcagcgtagtagcctggaagctgcatggaagtacatcattatttgtactgttggtgtcgcttttggtctgttcggtaccgtgctggtatacgccaacgccgccagcgttatgccgcaggcagaaatggcgatattctggagcgaggttcttaagcaaagctccttgcttgacccaacattaatgctgttggcctttgtgtttttgctaattggctttggtaccaaaaccgggctatttcccatgcacgcctggctgccggatgctcacagtgaagcgccgagtccggtcagcgccctgctctccgccgtattgctgaactgcgcgctgttggtgctgattcgctattacatcattatttgccaagccatcggcagcgatttccccaaccggttgttgctcatcttcggcatgttgagcgttgccgtggcggcatttttcattctggtacagcgggacattaagcgtctgctggcgtactccagcgtggagaacatggggctggtcgcggtggagctaggcattggcgggccgctgggaatttttgccgcgctgctgcacatcttaaaccacagtctggcaaaaacgctgctgttctgcggttccggcaatgtactgctcaagtacggcacgcgcgatctcaacgtcgtctgtgggatgctcaaaatcatgccatttaccgccgtgctgtttggcggcggtgcgctggcgctggcagggatgccgcccttcaacatttttcttagcgaatttatgaccattaccgccggactggcacgtaatcacctgctgattatcgtcctgctgttattgctgttaacgctggtgctggcgggcctggtacggatggctgcgcgggtgttaatggcgaaaccgccgcaggccgttaaccggggtgatctcggctggttgaccaccagcccaatggtgattctgctggtcatgatgctggcgatgggaacgcatattccacaacctgtcatcaggatcctggcgggcgcttccactatagtcctcagtgggacgcacgatctgcctgcacaacgtagcacctggcatgattttttgcctagtggcaccgcatctgttagcgagaaacacagtgaacgttaatagtagcagtaatcgtggcgaagcgattctcgccgccctgaaaacgcagttccccggcgcggtgctggatgaagagcgacaaacgcctgaacaggtcaccattacggtgaaaatcaatctgctgcctgacgttgtacagtatctttattatcaacatgatggctggcttccggtcctgtttggcaacgacgagcggacacttaacggtcattacgcggtttattatgcccttagtatggaaggggccgaaaaatgctggattgtggtgaaggcgctggtcgatgccgacagtcgggagtttccgagtgtcacaccgcgcgtccctgccgcggtctggggcgagcgagaaattcgcgatatgtacgggctgattccggttggcctgccggatcagcgtcgcctggtgttgcccgatgactggccggaagatatgcatccgctgcgcaaagatgcgatggattatcgactgcgccctgaaccgacgactgattccgaaacgtatccgtttatcaatgagggcaacagcgatgcgcgggtgatccctgtcggcccgctgcatatcacctccgatgaaccgggtcacttccgcttgtttgtggatggcgagcaaattgtcgatgctgattaccgcctgttttatgtccatcgcggcatggagaaactggcagaaacgcggatgggctacaacgaagtgaccttcttaagcgaccgcgtgtgtgggatttgcggttttgcccacagtgtggcctataccaatagcgttgaaaatgcactggggattgaggtgccgcaacgagcacatactattcgcagcattctgctggaagtcgaacggctacacagtcatttgcttaaccttggcctctcctgccatttcgttggttttgataccggctttatgcaatttttccgcgtgcgggaaaagagcatgacgatggcggaattgctgatcgggagccgtaaaacctacggtctgaatctgattggtggtgttcgccgcgatattctcaaagagcaacgtctgcaaacgctgaaactggtgcgcgagatgcgcgccgacgtgagcgagctggtagagatgctgcttgctacgccgaatatggaacaacgcactcagggcattggcattctcgaccgacaaatcgcccgtgatttgcgctttgatcacccctacgccgactacggcaatattccaaaaacactgtttacctttaccggcggcgatgttttctcccgcgtgatggtccgtgtcaaagagacgtttgatagcctggcaatgctggaatttgccctcgacaacatgccggataccccactgctgaccgaaggctttagctataaacctcacgcattcgcgctgggctttgttgaagcgccacgcggtgaagacgtgcactggagcatgctcggtgataaccaaaaattgttccgctggcgctgccgtgccgccacctacgccaactggccggtgttgcgttacatgctgcgcggcaataccgtttctgacgcaccgctgattatcggtagccttgatccctgctactcctgtaccgaccgtgtgacgctggtagatgtgcgcaagcgccagagtaaaaccgtgccgtataaagagatcgaacgctacggcattgatcgtaaccgtagcccgctgaagtaaggacagaagatgctgaagttactgaaaactattatgcgcgccggaaccgcgacggtgaaatatcccttcgcgccactggaggtcagccctggctttcgcggaaaaccggacctgatgcccagccaatgtattgcctgcggtgcctgcgcctgtgcttgtccggcaaatgcgctggctatccagaccgacgaccagcaaaatagccgcacctggcagctctatctggggcgttgtatttactgcggacgttgtgaagaagtgtgcccgaccagagccatccagcttaccaataactttgaactgaccgtcaccaataaagccgatctctatacccgcgcgacgttccatctacaacgttgcagccgttgcgaacgcccgtttgccccgcaaaaaaccatcgcactggctgctgaattgttagcacagcaacaaagtgcgccacaaaaccgcgaaatgttgtgggcgcaagcgagcgtctgcccggaatgcaaacaacgcgcgacgctgatcaacgacgatacagatgtactgctggtggctaaggagcagctatgagtccagtgcttacacaacatgtcagccagcccatcacgctggacgagcaaacgcaaaagatgaagcggcatttgctacaggatatccgtcgcagcgcttacgtttatcgcgtcgattgcggcggctgcaacgcctgtgaaatcgaaatttttgctgccattacaccagtattcgacgcagaacgttttggcattaaggttgttagtagtccgcgtcacgccgatattttgttatttactggcgcagtcacccgggcgatgcgtatgcctgcacttcgggcgtatgagtctgcccccgatcataaaatttgtgtttcctacggcgcgtgcggtgtcggcggcggtattttccacgatctctacagcgtctggggcggtagcgacaccattgtccccattgatgtttggatccccggctgcccgccaacaccggccgccaccattcacggtttcgccgtggcgctcggtttgctgcaacagaagattcacgctgtggattatcgcgatcccaccggggtgactatgcaaccgttgtggccgcagatcccgccaagtcagcgtatcgccattgagcgagaagcgcggcggctggcgggctatcgtcaggggcgagaaatttgcgatcggctcctgcgccatttaagcgacgatcctacaggaaatcgggttaacacctggttgcgcgatgccgacgatccacgtctcaatagtatcgttcagcaactctttcgcgtactccgggggttacatgactgaagagtgcggggaaattgttttctggacgctgcgaaaaaagtttgtcgccagtagcgacgagatgccggaacacagctctcaggtaatgtattacagcctagctatcggccatcacgttggcgtgattgattgtctgaatgtcgccttccgctgcccactgacggaatacgaagattggcttgcactggtcgaagaggagcaagcccgacgtaagatgctgggggtgatgacttttggtgagattgttattgacgccagccacaccgccctgttgacccgggcattcgcgccactggcggatgacgcgacgtctgtgtggcaggcgcgtagcattcaattcattcatctgttggatgaaattgtgcaggaaccggccatctatctgatggccagaaaaattgcgtgagaaggatttctcattaataaggactgttgatggctatgagtgacgaggcgatgtttgccccgccacaaggaataacaattgaagcggtaaacggaatgctcgcggagcggttagcacagaaacacggcaaggcgtctttattacgcgccttcatcccgctgccgccgccgttcagcccggtacaacttattgaactgcatgttctcaaaagcaacttctattaccgctaccatgatgatggcagcgatgtgacggcaacaacagagtatcagggcgagatggtcgattatagccgtcacgccgtccttctcggcagtagtggaatggcggagctacgctttattcgcacccacggcagtcgttttacttcccaggattgcacactgtttaactggctggcgcggataatcaccccggttctgcaaagttggctcaatgatgaagaacagcaggtggcgctgcgtttgctggagaaagatcgcgatcatcatcgggtactggttgatattactaatgcagtgctgagtcatcttgatctcgacgatctgatcgctgacgtcgctcgtgagatccatcattttttcggtctggctagtgtcagtatggtactgggcgatcatcgaaagaacgagaagttcagcctgtggtgcagcgatctttctgccagtcattgtgcgtgtctgccacgctgtatgcctggcgaaagtgtattgctgacacaaacgctacaaacccgacaaccgaccttgacgcaccgtgcagatgatctgtttctctggcaacgcgacccgttattactcttacttgcatctaacggctgcgaatctgcgctccttataccgcttacctttggcaaccatacaccgggtgcattgttgctggcgcatacctcttccactctctttagtgaggaaaactgccagctactacaacacatagccgatcgcatcgctattgccgttggcaatgccgatgcctggcgtagcatgaccgatttgcaggaaagtttgcagcaagaaaaccaccagcttagcgagcagctccttagcaatctgggcatcggtgacattatctatcaaagccaggcaatggaagacctgctccagcaggtagatattgtggcgaagagcgacagtacggtgttgatttgtggtgaaaccggaactggcaaagaggtgatcgccagagcgatccatcaacttagcccgcgacgcgacaagccgctggtcaaaatcaactgcgctgccatccccgccagtcttctggaaagtgagttattcggtcatgacaaaggggcgtttactggtgcgattaatacccatcgtggtcgttttgaaattgccgatggcggcacgttgtttctcgatgaaattggcgatctgccgttagaacttcagcctaaactgctgcgcgtattgcaggagcgggagattgagcgtctcggcgggagtagaacgatcccggtgaatgtcagagtcattgccgccaccaaccgtgatttgtggcaaatggttgaagatcgccagtttcgcagcgatctcttttatcgcctgaatgtcttcccactggaattgccgccgctacgcgaccgtccggaagatatccctcttttagcaaaacatttcacgcaaaaaatggcgcgccatatgaatcgcgcaattgacgccatcccgaccgaggcactacgccagttgatgagctgggattggccgggcaacgtgcgcgagctggaaaacgtgattgagcgggcggtactgttgactcgtggtaacagtctgaatttacatctaaatgtccgacaaagccgtttactgccgacgctaaatgaagatagtgcgcttcgcagtagtatggcgcagttactgcacccgacgacgccagagaatgacgaagaagaacgtcagcgcattgttcaggtattgcgagaaaccaatggcattgttgccgggccccgtggcgcagcgacgcgattagggatgaagcgcaccacgctgctgagtcgaatgcagcggctggggatcagcgttcgcgaggtgttgtaatctgcttttgcaggagtatgcatgagaaacaaactctctttcgacttgcagttgagcgccagaaaagcggcaatcgctgaacggattgccgcccataaaattgcccgcagtaaagtgagcgtctttttaatggcgatgtccgctggcgtgtttatggcgatcggatttactttttacctttccgttatcgccgatgccccgtctagtcaggcattaacccatctggtgggcggcctttgctttacactcggctttattttgctggcggtttgcggcaccagcctgttcaccagcagcgtaatgacggtgatggcaaaaagtcggggcgtcattagttggcgaacttggctgattaacgcacttctggtggcctgcggtaatctggcaggtattgcctgtttcagtttgttaatctggttttccgggttggtgatgagtgaaaacgcgatgtggggagtcgcggttttacactgcgccgagggcaaaatgcatcatacatttactgaatctgtcagcctcggcattatgtgcaatctgatggtttgcctggcgctgtggatgagttattgcgggcgtagcttatgcgacaaaatcgtcgccatgattttgcccatcaccctgtttgtcgccagtggctttgagcactgtatcgccaatttgtttgtgattccgttcgccattgccattcgccatttcgcccctccccccttctggcagctggcgcacagtagcgcagacaattttccggcactgacggtcagccattttattaccgccaatctgctcccggtgatgctgggtaatattatcggcggtgcggtgctggtgagtatgtgttatcgggctatttatttacgtcaggaaccctgaaaaatcagcccggcgaaacagttcgtcgggctgaagattattcttgcgcgatttgcccatcgggccaggcatgaatcacggctttgatcagcgtcgccaacggaatggcgaagaatacgccccagaatccccacaaaccaccgaagatcaccacgcttaaaataatcaccagcggatgcaggttaaccgcttcggagaacaacaccggcactaacaggttgccgtccagcgcctgaataatcagatacaccgcgaagcagctccagaattcagtacctgcgccaaactggaatagcgccacgccaaccaccggaatggtcaccacaaatgcgccaatgtacggaataagaacgctgaagccgaccagcactgccagcagcaggctatagttcagcccgaagagcaagaaccccagccaggtggcgatccccaccacgatcatctccagcactttgccgcggatatagttggtgatttgttgattcatctccttccacacctgtcctgccagcccacggttacgcggcagcacccggcgaacggcgttcagcatctgctctttgtctttcagcaggaagaagaccatcaatggcaccagcaccagatagacggctatggtcagcaaaccgaccaggctggcgagggaaattttcaccacgctatcgcccatggtcagcatccgactgcgcatattttcggccattgcatcaataatgcccgcgtccattaacgccggatagcggcgcggcaacgtggcggcaaagtcagaaagcttattgagcatccccggcatatcgcggattaagtagatgccctgttgccaggcgataggcagtaccacgaacgccatcagtagcaatataccgacgaaaaccaccaatacaatgctcgtcgcccagcggcgggagcagccaatagattgcagacgcacggttggccattccagcaaataggccagcacaatagccaccagcaacggagcaagcaggccactaaagaaaaagataatgccaaatccggcaactaaaataaccagcaaggcaatcgcttccgggtcgctaaaacggcggcgataccattgcatcaacatttcgagcataaagaccttccctgaacctcaagagcgggattgcgatccgcaattgtatcgaaatgtcacaaaaaagacttcgctttttatgacggattcaggaaactgaaaagtcatttgagtgggctaatcttcgccgttacactcaaaggcggcgcggtgggaacgatatttcacagtatcggtcaaatgactatctccagaaatacaggatagaggttatgttcaggcagttgaaaaaaaacctggttgcaaccctcattgctgctatgaccattggtcaggtagccccggcgtttgccgacagcgcagacaccttgccggatatgggaacctccgcaggaagcacgctttccattggtcaggaaatgcagatgggcgactattatgtccgccagctacgcggcagcgcgccgttaattaatgacccgctgttaacgcaatatattaatagcctggggatgcgtctggttagccatgccaatagcgttaagacaccgtttcatttttttctgatcaacaacgacgaaattaacgcctttgctttctttggcggcaacgtggtgctgcactctgccctgttccgttattccgataacgaaagtcaactggctagtgttatggcgcacgaaatctcccacgtcacccaacgtcacctggcgcgagcgatggaagatcagcagcgcagcgcgccgctgacctgggtcggcgcgttaggttctattttactggcgatggccagtccgcaggcggggatggcggcgctgaccggtacactggcgggaacgcgtcaggggatgatcagtttcacccagcaaaatgaacaggaagcggaccgcattggtattcaggtgctgcaacgcagcggattcgatccgcaggcgatgccaaccttcctcgaaaaattactcgatcaggcgcgttactccagccgcccgccggaaattttattgactcacccgttgccggaaagtcgtctggcagatgcccgcaaccgtgctaatcagatgcgcccgatggtggtgcagagcagcgaagatttctatctggcgaaagcgcgcacactggggatgtataattccggacgtaaccagctcaccagtgatttgctggatgaatgggcgaaaggaaacgttcgtcagcaacgagcagcacaatatggtcgtgctttacaggcgatggaagccaataaatacgacgaggcgcgtaaaacgctgcaaccgttactggcggcagaacctggcaacgcatggtatctcgatctggctactgatatcgatcttgggcaaaacaaagccaatgaggcgatcaatcgtctgaaaaatgcccgcgatttacgcaccaatccggtgttgcagctcaacctggcgaacgcttatttgcaaggcggtcaaccacaagaagcggccaatattctgaatcgctacacctttaataataaagatgacagcaacggctgggatttgctggcacaggcggaagccgcgctaaataaccgcgatcaggagctggctgcgcgagcagaaggttatgcgctcgccggacgactcgatcaggccattagcctgttgagtagcgccagtagccaggtgaaattaggcagcctgcaacaagcgcgttacgatgcgcgcatcgaccagttgcgccagctgcaggaacgctttaagccttataccaagatgtaattcgcattaaaggaagaacaatgaccaaacaggtaaaaatctaccataacccacgctgtagtaagagccgggaaacgctgaacctgctgaaagaaaacggcgtggagccagaagtggtgctctaccttgagacacccgccgatgcggcaacgctgcgcgatttgctgaaaatactggggatgaatagcgcccgtgaattgatgcgccagaaagaggatctttataaagaactgaacctggctgacagtagccttagcgaagaggcgctgattcaggcaatggtggataatccgaagctgatggagcgcccgattgtggtcgcgaatggcaaagcgcggattggtcgtccaccggagcaggtactggaaatcgtgggttaagatgtgctccatcgctagttgaagcacattgccggatgcgacgcttgccacgtcttatccggcctacgaatactatggattaacttcgcgtagttcggataaggcgttcgcgccgcatccgacaataaacaccttatttacaacttcagaatttctttcacaaacggaatggtcagcttacgttgcgcggtaatgctcgcacgatccaactgatccaacgtcataaatagcgtgcgcatttctctgtcgagccgcttcagcaagaaacgccccacatcttccggcagttcaaaaccacgcaaacgcgcgcgtaactgtagcgcctgcaacttatcttcatcagaaagtggctgcaatttgtagatctgcccccagtcgagtcggctcgcgagatccggtaatcccagattcaactgccgcggtggacgatcgccggtgatcaacaaccgtgttttgccgctttccagaattcgattgtagagatcgaaaatcgccatctcccacaactcatcgcctgcaatacactcaatgttgtcgatacagaccaggctcaaatgctccataccgtcgagcacttccggaacaaaccaggtgcgtttatccagcgggacatagcccaccgcatcgccacgctggctcaattccgcgcaagccgcgtgcagcagatggctgcgccccgcgccttcgcgtgcccagagatagatgtaaccgctatgttcctgacgcagcacgttttgcagcgcggccagtaaagaggagttatcccccggccagaaacttgcaaaggtttcgtcgtcaggaagataaagtggcaaagagagctgtgccggtgtgttcagagatacctcaaccaggatttcacaaaatcggctgaagtttaccacagaatcccatgatgtttgaaccgggcagcaacactgcccggtcggtacattatttgtctgttatatccgcgtcttctgcgtccagcaccacttcttcagggcgcagcacactgatcagtttgaagatcaaacttaagccgataccgacgatggtcgccagcgccataccttttaactccgccgcgccgatgtttaccttcgcgccactgacgccgatgatcaaaatcacggaagtcaggatcaggttctgtgctttgttgtaatccactttgctttcgatcaaaacacgaataccggaagcaccgatgacaccataaagcagcaggctaacgccgcccatcaccggcaatgggatcatctggatagcggcagccagtttaccgacgcaggaaagcaggatagcgaaaatcgccgccccgccgataacccaggtactgtaaacacgggtgatcgccatcacgccaatgttttctccgtaagtagtatttggcgtagagccaaagaagccggaaatcacggtgctcaagccattagcaaacatgctacggtgcagacctggatcgcgcagcagatcttttttgacgatattagccgttactaccaggtgccctacgtgttcggcaataaccactaacgccgctggcagaatagtcagaatggcaaaccactcgaagcgcggcgtatagagggttggcagcgcaaaccagtgagcattaataatcggcgtggtatcgacaattcccattgcgaaagagagcgcgtaccccaccagcacgccaattaaaatcgggataattgccaggaaaccacgaaacagcacggaacctaaaaccgtgaccgccagggtggtaatagagatgatgatggttttggagtctggcgtttgcccttcagccgggagtaaacccgccataccggcagctacgcccgccagctccagaccgatgacggcaacgattgcgcccattgccgcaggtggaaacagcacgtccagccagccggtccccgctttcttcacgataaaagaaaccaggcagaacagcacgccgcacataataaagccgcccagcgcgacttcataccctaacggcaacagtaacaataccggactaataaaggcaaagctggaaccaagataagccggaattttccctttacagatgaagagatacagcagcgttccaataccgttaaataacagtacagtcgccgggttaatatgaaataagacgggcaccaggacggttgcaccaaacatggcgaacaaatgttgcaaactaagcgggattgtctgtaaaagtggcggtctttcactcaccccgatagcacggcgcgtcatagtattatcctctgtattatgtgttataggcgctttactcaaaaaaaagccgactcttaaagtcggctttaattatttttattctttatttcgtaccaaagattttgtcaccggcatcgccgaggcccggaataatgtatccgtgctcgttcagtccctgatcaatgcttgcggtatacagttcgacgtccgggtgcgctttttccagcgcagcgataccttctggcgcagctaccagcaccagaactttgatgctgctgcagcccgcttttttcagcaggtcgatggtcgcgataacggaaccaccggttgccagcattgggtcaacgatcagcgccatacgctcatcgatgttagaaaccagtttctggaagtacggtaccggctccagcgtttcttcattacggtacataccgacaacgctgatgcgcgcgctcggaacgttttccagcacaccgtccatcataccaagacccgcacgcagaattggcacaacggtaattttcttacctttgatctggtcgatttctaccgggccgttccagccttcgatagttactttttccgtttcgaggtcggcggtcgcttcgtaagtcagcaggctacccacttcggaagcgagttcgcgaaagcgcttggtgctgatatcttgctcacgcatcagtcccagcttgtgtttgacgagtgggtgtttgacttccacgatcttcatactctttctcctttgaggggcagccacaaaaaaaatcgacggattatacctcctttcttcaaggcggcaatattcttttcgttgactttagtcaaaatgataacggtttgagataaagttattttatattcagatggttatgaaagaagattattccatccgaaaactaacctttaccctggcacaagtcttctttcgccgcgcgcctggggaaaagacgtgcaaaaaggttgtgtaaagcagtctcgcaaacgtttgctttccctgttagaattgcgccgaattttatttttctaccgcaagtaacgcgtggggacccaagcagtgaccgataaaacctctcttagctacaaagatgccggtgttgatattgacgcgggtaatgctctggttggaagaatcaaaggcgtagtgaagaaaacgcgtcgtccggaagtgatgggcggtctgggcggcttcggtgcgctgtgtgcattgccgcaaaaatatcgtgaacccgtgctggtttctggcactgacggcgtaggtaccaagctgcgtctggcaatggacttaaaacgtcacgacaccattggtattgatctggtcgccatgtgcgttaatgacctggtggtgcaaggtgcagagccgctgtttttcctcgactattacgcaaccggaaaactggatgttgataccgctagtgcggtgatcagcggcattgcggaaggttgtctgcaaagtggctgtagtctggtgggtggcgaaacggcagaaatgccggggatgtatcacggtgaggattacgatgtcgcgggtttctgcgttggcgtggtagaaaaaagtgaaatcatcgacggctctaaagtcagcgacggcgatgtgctgattgcactcggttccagcggtccacacagcaacggctatagcctggtgcgcaaaattcttgaagtcagcggttgtgatccgcaaaccaccgaacttgatggtaagccattagccgatcatctgctggcaccgacccgcatttacgtgaagagtgtgctggagttgattgaaaaggtcgatgtgcatgccattgcgcacctgaccggcggcggcttctgggaaaacattccgcgcgtattgccagataatactcaggcagtgattgatgaatcttcctggcagtggccggaagtgttcaactggctgcaaacggcaggtaacgttgagcaccatgaaatgtatcgcaccttcaactgcggcgtcgggatgattattgccctgcctgctccggaagtggacaaagccctcgccctgctcaatgccaacggtgaaaacgcgtggaaaatcggtatcatcaaagcctctgattccgaacaacgcgtggttatcgaataatgaatattgtggtgcttatttccggcaacggaagtaatttacaggcaattattgacgcctgtaaaaccaacaaaattaaaggcaccgtacgggcagttttcagcaataaggccgacgcgttcggccttgaacgcgcccgccaggcgggtattgcaacgcatacgctcatcgccagcgcgtttgacagtcgtgaagcctatgaccgggagttgattcatgaaatcgacatgtacgcacccgatgtggtcgtgctggctggttttatgcgcattctcagcccggcgtttgtctcccactatgccgggcgtttgctgaacattcacccttctctgctgccgaaatatcccggattacacacccatcgtcaggcgctggaaaatggcgatgaagagcacggtacaagcgtgcatttcgtcaccgatgaactggacggtggcccggttattttacaggcgaaagtcccggtatttgctggtgatagcgaagatgacatcacagcccgcgtgcaaacccaggaacacgccatttatccactggtgattagctggtttgccgatggtcgtctgaaaatgcacgaaaacgccgcgtggctggatggtcaacgtctgccgccgcagggctacgctgccgacgagtaatacccccgtaattaaagcgccagctctgccgctggcgtttttcaattcacctgtaaatcgcaagctccagcagtttttttcccccttttctggcatagttggacatctgccaatattgctcgccataatatccaggcagtgtcccgtgaataaaacggagtaaaagtggtaatgggtcaggaaaagctatacatcgaaaaagagctcagttggttaagcttcaatgaacgcgtgcttcaggaagcggcggacaaatctaacccgctgattgaaaggatgcgtttcctggggatctattccaataaccttgatgagttctataaagtccgcttcgctgaactgaagcgacgcatcattattagcgaagaacaaggctccaactctcattcccgccatttactgggcaaaattcagtcccgggtgctgaaagccgatcaggaattcgacggcctctacaacgagctattgctggagatggcgcgcaaccagatcttcctgattaatgaacgccagctctccgtcaatcaacaaaactggctgcgtcattattttaagcagtatctgcgtcagcacattacgccgattttaatcaatcctgacactgacttagtgcagttcctgaaagatgattacacctatctggcggtggaaattatccgtggcgataccatccgttacgcgctgctggagatcccaagtgataaagtgccgcgctttgtgaatttaccgccagaagcgccgcgtcgacgcaagccgatgattcttctggataacattctgcgttactgccttgatgatattttcaaaggcttctttgattatgacgcgctgaatgcctatagtatgaagatgacccgcgatgccgaatacgatttagtgcatgagatggaagccagcctgatggagttgatgtcttccagtctcaagcagcgtttaactgctgagccggtgcgttttgtttatcagcgcgatatgcccaatgcgctggttgaagtgttacgcgaaaaactgactatttcccgctacgactccatcgtccccggcggtcgttatcataattttaaagactttattaatttccccaatgtcggcaaagccaatctggtgaacaaaccactgccgcgtttacgccatatttggtttgataaagcccagttccgcaatggttttgatgccattcgcgaacgcgatgtgttgctctattatccttatcacacctttgagcatgtgctggaactgctgcgtcaggctagcttcgacccgagcgtactggcgattaaaattaacatttaccgcgtggcgaaagatagtcgcatcatcgacagcatgatccacgccgcacataacggtaagaaagtcaccgtggtggttgagttacaggcgcgtttcgacgaagaagccaacattcactgggcgaagcgcctgaccgaagcaggcgtgcacgttatcttctctgcgccggggctgaaaattcacgccaaactgttcctgattagtcgtaaagaaaacggtgaagtggtgcgttatgcacacatcgggaccgggaactttaacgaaaaaaccgcgcgtctttatactgactatagcttgctgaccgccgatgcgcgcatcaccaacgaagtacggcgggtatttaactttattgaaaacccataccgtccggtgacatttgattatttaatggtaagcccgcaaaactcccgccgcctattgtatgaaatggtggaccgcgagatcgccaacgcgcagcaagggctgcccagtggtatcaccctgaagctaaataaccttgtcgataaaggcctggttgatcgtctgtatgcggcctccagctccggcgtaccggttaatctgctggttcgcggaatgtgtagcctgatccccaatctggaaggcattagcgacaacattcgtgccatcagtattgttgaccgttaccttgaacatgaccgggtttatatttttgaaaatggcggcgataaaaaggtctacctttcttccgccgactggatgacgcgcaatattgattatcgtattgaagtggcgacgccgctgctcgatccgcgcctgaagcagcgggtactggacatcatcgacatattgttcagcgatacggtcaaagcacgttatatcgataaagaactcagtaatcgctacgttccccgcggcaatcgccgcaaagtacgggcgcagttggcgatttatgactacatcaaaagtctcgaacaacctgaataaccctatgccaatacacgataaatcccctcgtccgcaggagtttgctgcggtcgatcttggtagtaacagttttcacatggtcatagcccgtgtggtagatggtgccatgcagattattggccgcctgaaacagcgggtgcatctggcggacggcctggggccagataatatgttgagtgaagaggcaatgacgcgcggtttaaactgtctgagcctgtttgccgaacggctacaagggttttctcctgccagcgtctgtatagttggtacccatacgctgcgtcaggcgctgaacgccactgactttctgaaacgcgcggaaaaggtcattccctacccgattgaaattatttccggtaatgaagaagcccgtctgatttttatgggcgtggaacatacccaaccggaaaaaggtcgcaaactggttattgatattggcggcggatctacggaactggtgattggtgaaaatttcgaacctattctcgttgaaagccgccggatgggttgtgtcagctttgcccagctttattttcctggcggggtcatcaataaagagaattttcagcgcgctcgcatggcggcagcacaaaaactggaaactttaacctggcaattccgtattcagggctggaacgttgcaatgggcgcttccggtaccataaaagccgcccatgaagtgttaatggaaatgggcgagaaagacgggataattaccccggaacgtctggaaaaactggtaaaagaagttttacgtcaccgtaatttcgcaagcctgagtttaccgggtctttccgaagagcggaaaacagtcttcgttccgggactggcgattttatgcggtgtgtttgatgctttagccatccgtgaactgcgcctttctgacggggcgttacgcgaaggcgtactgtatgaaatggaaggacgtttccgtcatcaggatgtgcgtagtcgcaccgccagcagcctcgccaaccagtatcacatcgacagcgaacaggcccgacgggtgctggataccactatgcaaatgtacgaacagtggcgggaacagcaaccgaagctggcgcatccgcaactggaggcgctactgcgatgggccgccatgctgcatgaggtcgggttgaatatcaaccacagcggtttgcatcgccactccgcttatattctgcaaaacagtgacttgccgggttttaatcaggaacagcagctgatgatggcgacactggtgcgctatcaccgtaaagcgattaagctcgacgatctaccgcgctttaccttgtttaagaagaaacagttcctgccactgatacagctattgcgccttggcgtattactcaacaatcaacgtcaggcaaccaccacaccgccaacattgacgctgattactgatgacagtcactggacactgcgtttcccgcatgactggtttagtcagaatgcgctggtactgcttgatctggaaaaggagcaagaatactgggaaggcgtggctggctggcggttgaaaattgaagaagaaagtacaccagaaatcgccgcttaatactttgcgggccgacgagaaatgtcggcccgcattattcaggcactttcgcgaatgggttcgatttcattcagcgtatcaattaacggctgcggcttaccaataagataaccctgcatataatcgatccccaaagagagcaccgcctcgcggatctcttcgttttcaacgtactctgccactaccagcattttcttcattcgcgccaggtggcaaatgcttgccactatctgataatccagactattactcacaatattgcggataaaactgccgtcaattttaagcagatcggcattcacatttttaagccgcgcatagctggcgtagccggtgccgaaatcatcaatcgcaatctggcagcctaattcctgaagatgctgcaaggtgatttgcgcctgcttaacattggtcagagcattactttcggtgacttcaaaaataagttgccacgcttcaatctgatatttagccagcaactgactgacttcaacaggaaaacgagcctgacatacgctggttggagacagattaatagcaaaacggtgagcgggcatcttcgctctgttttcagccataaattgcagcgtatgctcaatgacccacatgtcgatactgctgcttaaaccaaattcgtgcgcgaccggcaagaagctatcggggctgatcagttcatcattctcacctttcatgcgcagaagaatttcatggtaaacatcaccacgcataccggtaatcggctgggccatcaggaaaaaatggttgtgttccagcgcctgctgtagtcgattcatcatcgcgactttatctttcaattcgcgttgcaaatacattgccccgcgacgctgcatattttccggggcgttggtcacgatggaaagttcggcgaccgtatttagctctcccagcagcaggtagatatgattcactgggctgcgcacatagcagtaactgacgccaatctgcggttgcatcggcatgccatcccaaaagaaacgaaattgcttgagatggctatccagtgcggtaatgcgctcctggtggctttctgtattcagtcgcagcgcgagatcgttaccgctaagctgataaacatcttcacccggttccagcaagggactcagccagtgagaaagtttttgcttgtattgaatccgcagcatgatgccatagttcttaaccagcatttccatgccagggatgcgtaaataacaaagcgcagaccagggggcatcacgcaacgcgcgattcagggcgcgaacatttggcagatgaaccaccgggtccacatacgcaagccgctgaatgcgtctgactaccgctctctgacgggttgccagtacagccatataattgacaataaaagagaataccagataactggaggaggttatggtcagctgcgtggtatagccaggataaatgggaatgtaattttgatagctgtggatgctgatcatcaacacgaccgcccagagcaggctaatcagcttataaccatagcgcatcgctccccacatcatcaggggcagcaataaactcaaggtataattggtgctaaaaattgtgcttttttcatttaacggcatgcataacagcaacaataaagcacctaatgccagtagccagagcgcgaactcttttttggtgactttggcatcaacctgctgttttaattggctataatagctacgtaaataaaatggatttcgcactacccgaatgatgaagtagcacagcgggacaccgatcagattacccaccagtaaggcctgataattgattaaagtcccgaggttaaaaggcatgacaccgaccagattttctctgctcgccagtaatcctacaaatgcagcaaactggaaaagtatcagaaacagcgttgcaggaaacacaatctgccagaatatacgctgggaaattaaacgggtatcaccatgactaacgttgttacgccggggagtaaagaccctgtaaccgccccaacagagaatgataatgataataaaattagccgttaaacttagcgtttcgtaaaaacccagctctgcatatttgcggacaaaaatccctaaggcgatccctggcaatgccgcccagctgaaaaacatcatcatgctgatcatcagtgccagaggcagataaaagagaaaaacctcaccggaagaaatatgcgcgaaagtattaatgtgggcgaaaatgggcaagattaaagaaggcaggaacagcggaagcccccaccatttatcacgtatttttatataagttgcattcagtttcatagatgctcagcagaatcccccacatcctgaaggaggtgtattcagacaggcatcccacctgacttcgaatgatgattattcatcactatagagagcattgattctaagtgtcatatgaaagtaccaattgatatatatcaaacaaaataaccctgattaatgaattattacgtttatcatgttaattcatcattattacatcatcattgtaaataattaaattaacttccataacattaaaatatgtatccactgacgcttttttacataacgaagaattgaccattttgtcctgttgtgccttaatgtaagtaccgtccacagcgtgggacatacttcaaggaaccttttgtgagtcaggcaaccagtatgcgaaaacgacaccgatttaacagtcgcatgacccgtatcgtactgctcatcagctttatcttcttctttggccgttttatctacagctccgtcggtgcctggcagcaccatcagagcaaaaaagaagctcagcaatccacactctccgtcgaaagtccggtacaacgttaacggttaccttctccactttcacagaacataacggcacttcgctgtcggatgcttttgctgtttgggattatcaaagcggcagatattctttcatcttaaattttacgtctttatcctgactgatgtttatcctgtttggctgcgaaataaatataaaattaatatatatgttgtaatgatatatttttataaattattccctgcgtgaattttaataaatttaatctatccctttatacgcaatacatttactttcctcttttgatgatcttaaatgtcttatttttcgtaatgtgtataacaaggaatagtgatgaaatttaaaaaatgtcttctgcctgtggcaatgttagcgagtttcactctggcaggatgccagagtaatgctgacgatcatgctgccgatgtttatcaaaccgatcaactgaataccaaacaagaaactaaaaccgttaatattatttccattcttcccgcaaaagttgccgtagacaactcccaaaataaacggaacgcacaagccttcggcgcgcttattggcgcagtcgctggcggtgttatcggccacaacgtcgggtctggcagcaattccggaacgacggcaggtgcagttggcggcggagctgtaggcgcggcagcgggttctatggtgaatgataaaaccttagtggaaggtgtttctttaacctataaggaaggcaccaaagtgtatacctctacccaggtgggtaaagagtgccagtttacgacaggtttagccgttgttattaccacgacgtataacgaaacgcgtattcagccaaataccaaatgtcctgaaaagagctaataatcaggaggagtcatgaagaaagtttttctttgcgccatcttagcctccttaagctatccggctatcgccagtagtttgcaggatcaactctctgctgtcgcagaagcggaacagcaaggtaaaaatgaagagcaaaggcagcatgacgaatgggtcgcggagcgcaacagggaaatccagcaagagaagcaacgtcgcgcaaatgcccaggccgccgctaacaaaagagcggcaacggcagcggcaaataagaaagctcgtcaggataaactggacgccgaagcctctgcggacaaaaaacgcgatcaaagttatgaagatgagctacgcagcttagagattcagaaacaaaaactggcgctggcgaaagaagaagcccgcgttaagcgagaaaacgaatttatcgatcaggaactgaagcacaaagctgcgcaaaccgatgtggtgcaatctgaagctgacgccaacagaaatatgactgaaggcggtcgcgatctgatgaaaagcgtgggcaaagcagaagagaacaaaagcgacagctggtttaattaatcgatgttagtaacttcaatcctataattcttgaagataaaaaaccctctgtagtaacagagggttttgttcattcatagtgcagggtcaaatcattcccactcaatggtagctggcggcttgccgctgatgtcatacaccacgcgggaaataccgttcacttcattgataatgcggttggaaacgcgaccgaggaaatcgtacggcagatgcgcccagtgtgcggtcataaagtcgatggtttcgacagcacgcagagagacaacccagtcatacttacgaccatcgcccattacgccaacggaacgtaccggcaggaacacagtgaacgcctggctgactttgtcgtacaggtccgctttacgcagttcttcaatgaagatggcgtcagcacggcgcagcaggtcacagtactctttcttcacttcacccagaacacgaacgccaaggcctggtcccgggaacgggtgacggtacagcatgtcgtacggcaggcccagctccagaccaatcttacgcacttcgtctttgaacagctctttcagcggttcaaccaggcccatcttcatctctttcggcaggccgcccacgttgtggtgagatttgatgacgtgtgctttaccggttgcagacgccgcagattcgataacgtcagggtagatggtgccctgcgccagccacttcacgtcttccagtttcagcgcttcttcatcgaatacttcaacgaaaacgcgaccgatgattttacgttttgcttccggatcgttttcgccagccagcgcactcaggaagcgatcttctgccggtacgtgaacaatgttaagaccaaagtgatcgccaaacatatccagaacctgctctgcttcgttgaggcgcagcaggccgttgtcgacgaatacgcaagtcaggtttttaccgatagcgcggtgcagcagcattgcggttacggaggaatccacaccaccagagaggccgaggatgactttatcgtcgcctacctgctcgcggatgcgagctacagcatcgtcgataattttcgctggcgtccacagggcttcacactggcagatatcacgcacaaaacgctccagcatgcgcataccctggcgggtatgagtcacttccgggtggaactgtacgccatagaagcgtttttcttcgttagccataatggcaaacgggcagctttcggtgctggctacggtgatgaagtcggacggaatagcggtaactttatcgccgtggctcatccagacatcgagcagcggtttaccgtctgcggtcagcgcatcttcgataccgcgaaccagtgcgctgtcgtttacgacttcaacctgcgcgtagccaaattcacgttcgttagaggcttcaacgtgaccgcccaactgcattgccatggtctgcatgccatagcaaacgccgaataccggtacgcctgcttcaaagacatactgcggcgcacgcggactgttttcttcagtagtactttccgggccgccggaaagaataatgccgcttggattgaagtcacgaatttgtgcttctgtcacatcccacgcccacagttcgcagtaaacacccagctcacgcacgcggcgcgcaaccagttgagtgtactgagaaccgaagtccagaatgaggatgcgatgcttatgaatgttttccgtcattgacgcttattccgaggcaagtgaaacagataatataaatcgcccgacatgaagtcgggcgaagagaatcaggagcccagacggtagttcggggactctttagtaatggtcacgtcgtgaacgtggctttcctgaatgcccgcaccgctgatacgtacaaactccgctttagtacgcagttcgtcgatagtaccacagccggtcagacccatacaggagcgcaggccgcccatctgctggtgaatgatctctttcaggcgacctttataggctacgcgaccttcgataccttccggcaccagtttgtcggcagcgttatcgctctggaaataacggtcagaggaacctttggacatcgcgcccagggaacccataccacggtaagatttgtaagaacggccctggtagagttcgatttcacccggagattcttcagtacccgccagcatggaacctaccatcaccgcgcttgcgccagcggcgatagctttggcgatgtcgccggagaagcgaataccgccatcagcgataaccggaataccggtgccttccagggcttctactgcgtcagcaacagcggtaatctgcggaacaccgacgccagtcacgatacgagttgtacagatagagccagggccaatgccgactttaaccgcactgcaaccagcttctgccagagcgcgtgcacctgcagctgttgccacgttgccgccgataatttgcagatccggatatttagcacgggtttcacggatacgttgcagtacaccttcactgtgaccgtgggaggagtcgatcagcagaacgtcaacgcctgcggcaaccagcgcgtcaacacgctcttcgttacccgcacctgcgccaaccgctgcaccaacacgcagacggccttgctcgtctttacaggcgttcggtttacgttccgctttctggaagtctttcacggtgatcatgccgatcaggtggaattcgtcatcaaccaccagcgctttttcaacgcgtttttcgtgcatttttgccagcaccacttcacgggcttcaccttcacgcacggtgaccagacgctctttcggcgtcatgtaaacgctaaccggctggttcaggtcggtaacaaaacgcacgtcacgaccggtgataatacccaccagttcgttttcttcggtaacgaccggatagcccgcaaaaccgttacgctcggtcagttctttcacttcgcgcagcgtcgtggttggcagaacagtctgcggatcagtcaccacaccagattcgtgttttttcacacggcgaacttcttctgcctggcgttcaatggacatgtttttgtggataaagccgataccgccttcctgagccagagcaatagccaggcgcgcttccgttacggtatccattgctgcggaaagcatagggatattcagacgaatagttttcgtcagctgggtgctgaggtcagcagtattcggcagaacggtagagtgagcaggaacgaggagaacgtcgtcaaacgtcagagcttctttagcgatacgtagcatgggcaatatctcgaccagagtggttaataaatattgccgcggcattatacagagcgtaaccgattgcatctacccctttttgcaaaaaatgcttgctatccccgaagggcgggttactatcgactgaataacctgctgatttagaatttgatctcgctcacatgttaccttctcaatcccctgcaatttttaccgttagtcgcctgaatcaaacggttcgtctgctgcttgagcatgagatgggacaggtttggatcagcggcgaaatttctaatttcacgcaaccagcttccggtcactggtactttacactcaaagacgacaccgcccaggtacgctgcgcgatgttccgcaacagcaaccgccgggtgaccttccgcccatagcatgggcaacaagttttagttcgcgccaatattacgctctacgagccgcgcggcgactaccagataatcgttgagagtatgcagccggccggtgaagggctgctgcaacagaagtacgaacagctcaaagcgaagttgcaggctgaaggtttgttcgatcagcaatacaaaaaaccacttccctcccctgcgcattgcgttggtgtgatcaccagtaaaaccggtgctgcgctacatgatattttgcatgtgttaaaacgtcgcgatccttctctgccggtgatcatctaccctgccgccgttcagggcgatgacgcgccggggcaaattgttcgcgccattgaactggcgaatcagcgcaatgagtgcgacgtattgatcgtcgggcgcggcggcggtagcctggaagatttatggagttttaacgacgaacgcgtagcgcgggcgatttttaccagccgcattccggttgtcagcgccgtcgggcatgagacggatgtgaccattgccgattttgttgccgatctgcgtgcgccaacgccgtctgccgccgctgaagtagtgagccgtaatcagcaagagttactgcgccaggtgcaaagcacccgtcaacggctggagatggcgatggattattatctcgccaaccgcacacgtcgctttacgcaaattcatcaccgattacagcaacagcatccgcagctccggctggcacgccagcaaaccatgcttgagcgcctgcaaaagcgaatgagctttgcgctggaaaatcaacttaagcgtaccgggcaacagcagcagcggttaacacagcggctgaatcagcaaaatccacagccgaagattcatcgcgcgcaaacgcgcattcagcaactggaatatcgtttagcagaaaccctgcgcgcacagcttagcgccacgcgtgaacgtttcggtaatgcagtaacgcacctcgaagccgtaagcccactgagtacgctggcgcgtggatacagcgttactactgctactgacggcaatgtactgaaaaaagtgaagcaagttaaagcgggtgaaatgctaaccacacgtctggaagacggctggatagaaagtgaagtaaaaaacatccagccagtaaaaaaaagccgtaaaaaggtgcattaagccagcacgaattcaacgcgttttttgcttatcaagccatgcccgtgctgacagaagtaatctactgcaccacaggcttttaacacctgcaacggttgatggcagtctggacaaagagctttcatttcaataaattccccgcaggatcggcaacgcgcatggccgttatcctgatcaagcacatgctgacattgtggacaatgcagttccatatgaattcctccggtagccattccctctacattcatagagggaatggcagataaaatacttacggataattatttatttttcttgatgtgcttcatcagacgcttacgtttacgcatctgggttggcgtcagggtgttacgcttattcgcatacgggttttccccttctttgaactgaatacgaatcgggcttcccattacgtccaggcttttgcggaagtagttcatcaagtagcgcttgtaggaatcaggcaggtctttcacctgattaccgtgaatcaccacaatcggcgggttataaccaccggcgtgggcatatttcagcttcacacgacgaccgcgtaccagcggcggttggtgatcttcaacagccatcgtcatgatgcgcgtcagcatagaggtccccacacgacgggtggagctgtcatacgcttcacgtacactttcaaacaagttaccaacaccactgccgtgcaaggcagagataaagtgcacacgagcaaaatcgataaagcccagacggaagtccagcgtttctttcacctgctctttcacttcctgactcaggccatcccacttattcaccacaatgacaagactgcgcccactattgagaataaagcccagcaggctgagatcctgatcggaaataccttcgcgcgcatcaatcactaacatcaccacgttggcgtcttcaatggcctgcaacgttttgattacggagaatttctctacagcatcggtgattttgccgcgtttacgtacgccagcggtgtcaatgagcacatactcacgtccatcgcgttccattgggatgtagatgctgtcacgcgtcgtgccaggcatgtcgtaaacaacaacgcgctcttcaccaagaatacggttagtgagtgtagacttacctacgttcggacgacccacaatcgccagtttgatcggcagactttgcgggtcgaagtcgtcttcctcttcttcttcgccgttctcttccgcttcaaattgcgcccagtattcagcgtcttcgtcgacttcctcttgcggtgcgagatcttccatccacggcagcagcacatgctccagcagacttaatacgccacgaccgtgagacgcggcgatcgggtagatttcacctaaaccaaggctgtagaaatcaaccactgcctgatcgggatccagaccgtcagttttgtttgccaccaggaaggtcggtttttcacgggagcgcagatgtttggcaatcgcttcatctgccggcatcaggcccgcgcgcgcatccaccataaacagtacgacgtccgcttcttcaatcgccagcaggctttgttccgccatgcgggtttctacaccgtcttctgtgccatcaatcccgccggtatcaatacagataaactcacggccttcaatttccgcacgaccgtacttacggtcacgagtcagacccgggaaatccgcaaccagcgcatctcgggtgcgagttagacggttaaataacgtggattttcctacgttagggcgcccgacaagcgcgaccacaggtaccatgtttaaagcctcatttttataaatcatcagacaacgcacgctatattcgcgtcgttgttaaaaacaggaaaacggcccctgtccaggagccgttttcaaagtgaacgacagagacgattaacgtgtaatagagtacacggttccgtcttttgcctggatcagcagtttgccgtcagcggcaaccggttcagtctggaaaccggaactatcaactttttgctgggcaacgaaacgaccatcttcgacgttaatccagtgcagataaccttcactgtcaccgaccaccaggttgccattatacagcaccggagaagtcagcaggcgatgcagcagatcgctttgtgtccacagcgtaacgccgccatcaatggtcaacgccatcacccggtcattttgatcgaccagatagatgcgattgccgtcgacgatgaaatcattcacgctacccagttcgcgtttccacataatctgaccactgcgcagatcaagcgccgtcaggttaccattataggccagcgcgaaaacaacgccgttaacaacgacgggagtcgtgtcaacatcgctcagacggtcaatttcggtagaaccggtcgcctgggaaatacgctgctgccaaatcatctggccctgttccatcagcactgcgctgacgcgaccattatcgccccccacgacggccgcaccaaaagccgttgtcggcgcagactcgccacgcaaagagaggctaggcatatcgaggttaactgtccatttgacagcgccgtcagcttcgttcagcgcttgtaactgaccgttactggtgtggattaacaccagaccgtcgctgaccaccgggcggctaagtgcttcacccgcgactttagtttgccatgccacagtaccatcgctggtattcagcgcgtaaacctgcgccttttcgctgccaatgtagacatgcccaccagacacggtcacaccgccagaaagtaatgcaggctctttagagaaccagccatctttctcggccaggctgacagaccagatttctttgccatcatccgcattcagcgcttttactaaaccagcgcggtccgctgcatagacaacgttgtccgccagtgccggatgaagattggaatagaagttgccaatgccgctaccaacggaagtgctccacgccgtggtcggcgtaaactggttttcaacggttggcaatggggacatctttaccacatcttcttcgctgttaaacaggctacagccgcttaaaagggtaacggaaagcagtcctggcagcagtaatttacgcaattgcatcgggtccctctcagatggacaaattattaattttcatctgcatcatttcgctcagtgccggagtaacatcgcttttcacgcctgcttcccatgcactacgcgcaccttgcttatcacctttgctcagcaatgcttcaccacgcaggtcggcaacaatggcagcccacccttcacctttgatggtatcaagggttttcagcgcggcatcagcctgcttgagctgtacctgaacgcgagcaagacgcagatttatcacggctttgagattttcatcgctcgtgtctgccagcccctgttgtaactgggcggcagctttctctagttcatttttgtcaacaaattgctgcgcaagttccaaagaagccagcgcaccataagtatttttattttcagcagcaaatttttccgccgccgggatgctatccggtttgccttcgctcactgcggtaaccgcattttgataggcaagagaagcggagcgtgcagaatcaacctgatggctgttccagtagcgccagccaatcagtgcgccaacgcccaaaatcaccccaacagccagtgctttgccattttcagcaaaaaagcgtttaaccgcttctacctggtcgttttcgttctcgtaaatttccacgctgtccttctccttccttaacccagtaacgtgcgcaaatgcgcggctacgctatcctgcgcaactgccgtttgctcaccagagcgcaaatccttcactactgctgtgccgttagccacttcagactcacccagcaccacagcaacgcgggcaccccatttatcagcacgggcaaactgtttcttaaagttgccgccgccgtggttggtcatcaatttcacgcccggtaattcatcacgcagacgctcagctaatgccatagccgcagattgtgtatcagcaccactagccaccaggtatatatcgacaacaggatcggctttaaattccggattaacggcctgtactaacaatacaagacgttcgaggcccatagcaaaaccgacagccggtgttgcacgaccgcccagttgttccacaagaccgtcataacgaccgcctgcacacacggtgccctgggagccgagactgttagtcacccactcgaaaacggtacggttgtagtaatccagaccacgcaccagacgctggtttacggtgtaagcgatccccgcgctctccagcagtttgcacagaccggcaaaatgctcacgagattcctcgtccagatagtcacctaatgccggagcgtcgttgagaagcgcctgcacttccggatttttactatccagcacgcgcagcgggttagtgtacatgcggcgtttgcagtcttcgtccagcttttctttatgctgctcaaggaatgccaccagcgcatcgcggtaattggcgcgtgcttccaggctaccgatagagttcagctcaagagttacgtgctcggaaatacccagcgcgcgccaccagcgggcagtgagcataatcagttcagcgtcgatatccggaccttgcagaccgaaaacttcgcagcccaactgatggaactgacgataacgccctttctgcggacgctcgtgacggaacatcggcccgatataccacagacgctgttcctgattgtacagaagaccatgctcgatgccggcgcgtacacagcccgccgtcccttcagggcgcagagtcaggctgtcgccattgcgatcctcaaaggtgtacatctctttttcaaccacgtcggtgacttcaccaatcgcacgtttgaatagcggggtctgctctacaatcggcaagcggatttcactgtaaccgtagctgccgagcacgtttttcagtgtgccttcaatgcgctgccagatggccgtttcgccaggcaggtaatcgttcatgccgcgaatggcttgaatgttttttgccacgtttattctctttctgaatataaaaatgaaccctcaacgcttccctcaatgtttcgggagccatgcgggttcaatcatacacgggaagcgaggcgcttcccatcacgttattatttttcaacctgctgaacgtcaattcgacgcgcttcgtccagctgactggctttcgcacgaatgcgtgcttccagctggtcgatcatatcgttgttgtccagacggtctttgcgcacgccatcttcatagaggccgcttttcttgttgccgccggtgacgccgagtgtagaaaccagcgcctcacctgggccattcaccacgcagccgataatgctaacgtccatcggagtgatgatatcttccaggcgttgctccagcgcgttaaccgtaccgataacatcaaattcctgacggctacaggtcgggcaggcgatgaagttgatccctcggctacggatacgcaggcttttcaaaatatcgaaaccgactttgatctcttcgaccggatcggccgccaggcttacgcgcagcgtgtcgccgatgccttcagacagcagcagacctaaaccaatggcggattttactgccccgctgcgcgcaccaccggcttcggtgatccccagatgcaacggctgatcgatctgttttgccagcaaacgataagactcaacagcgaggaagacgtcagacgctttcacgctgactttgaactgatcgaagttcaggcgatcgagatgatcaacatgacgcatggcagattccagcaacgcctgcggcgtcggttcgccatacttttcttgcagatctttttccaggcttccggcgttaacgccaatacggatcggaatgtttttatcgcgcgcacagtcaaccaccatgcgaatacgctcttcattaccgatattgccagggttaatacgcagacaatcgacgccgtattccgctactttcagcgcaatgcgatagtcgaagtggatgtcagccaccagcggcacgttaacctgctgtttgatgagtttgaacgcttctgccgcgtccatcgtcggtacggatacacggacgatatcagcgccaacgcgttccagcgccttgatttgattgaccgttgcttcgacgtctgtcgtacgcgtattggtcatggactgtacggcgatgggagcaccatcgccaatcggcacattcccaacgtaaatacgtgtactttttctacgttgaattggagcctggttatgcatgaaaaatctcccgcgttacccgtctgttactgcgccggactttgttcggcattgagggtcagacgcgcaacctggttagttctgataaaacgactcagatcgacaggtttcccttgatactggatctgtactgcggctggcgcaccaattttcagtttgtacggtgcctggccggttaagttcaaattaccgtctttacgctgcataccgctaaacaattttttaccggtagcatcagtgacctccagccagcaatcggcagtaaagttcatcaccagcgcattcggatcagccaccggcgtggtcacgccagcctgatcggttggcaacggcgcagcaccatctggcgttgttgctgccgttggtgccggggtcgcggcggtatcaacatttgcctggctagggctaacaaccgcattctgttgcggatcaacagctggtgctggcgcagttacggcaggtgtttgcgtgttggttgcggtagtatccacagacgctggcggcgtggacgttgtagccgggtctgtagttgtgctcgtatttaatggaacactctgcccctgctcgctattactgctcagttccgcgctagattgatcggccatagtggtgatctcttcctgctgagctttgcggtcttgccaccaccaggcaccgctcaggccgataaccacaaacaacaccagccaagtgaaggtcatcagccagccgtcgcgttttttgcggcgtttaccgagggaaaaactctgcatcggcgcaacttttgcagcccgaagtggagcctgcttttccagccctggcagcagttcttcttctggaatatgtaccagacgcgcataagagcggatatatccgcgcaggaatgtactagcaagatcggcgggtgccttatcttcttcaatgtcgcgtaccgtggaaaccttcaggcaaagtcgctcggcaacggcctgctgactaagtcctagttgttcgcgagcattacgcaggcgagcgccggtagtaagtgcttcattttggtcgtgcgtggcttcagtattcattcgctgcaggtacgtttaaatgagaattgagatgccggtgaaccatcatgctcacccacaccgcgaaacatccgttaagttaaccgttatcatacagtataagaccgtctgtgtgctcgtgacaaagcccacattcactaaggctaacttactgttgcatcgttacatactgccttaaagtcagcaaaaacgcaccgttaatattgaccagacaattgcaacttaatacttcattcataaaacattacgccacggtacataaagtaaccgtggcgtaatggctatcagaccgctttaatgtcgatggcttcaccctgcatccgtttacgcagggtacgtttcgtacggtcgataacatcgcccgccaactgaccacaggcagcatcgatatcatcaccacgagttttacgcacaatagtggtgaaaccgtagctcatcagcactttactgaaacggtcgatacggctgttgctgctgcgtccatacggcgcacccgggaacgggttccacgggatcaggttgatcttacacggcgtatctttcagcagttccgccagttggtgcgcgtgttcagtgccgtcgttaacgtggtcaagcatcacgtattcaatagtgactcggccctgattggcgttggatttctccagataacggcgcaccgcagcaaggaacgtttcgatattgtactttttgttgatcggcacaatttcgtcacgaatttcgtcgttcggcgcgtgcagggaaattgccagtgcaacgtcgatcatatcgcccagtttatccagcgccggaactacaccggaagtggaaagcgtgacgcgacgtttagacaggccaaaaccgaaatcatcaagcatgatttccatcgccggaacgacgttgttcaggttgagcagcggctcgcccatgcccatcatcactacgttagtgatcggacgctgaccggtgacttttgctgcgccgacgattttcgccgcacgccacacctggccgataatttcgctcacccgcaggttgcggttaaagccctgctgggcggtggaacagaatttacactccagcgcacaccccacctggctagagacgcagagcgtggcacggtcgtcttccgggatatacaccgtttcgacgcgctgatcgccaacggcgatcgcccatttaatggtgccgtcagaactacgctgttcttcaaccacttccggtgcgcggatttccgccacctctttcagtttgccgcgcaacactttgttgatgtcggtcatctcatcaaagttgtcgcagcaatagtgatacatccacttcatcacctgatcggcgcggaagggtttttcacctaaatctttaaaaaactcccgcatctgctgacggttgagatccagcaggttgatttttccatctttcgtggtgacgttttcaggtgtgactaattgttcagacatatgctattccggcctcgttattacacgttatggcccctggagggttgaaaaaagaaacgccccggtgagcggctgctcgtccgggggcgctgcattgtacaaattctggcgcacggatgccacgtttgcacgcggcatttacgaaattattaacgggtgcgcgggcacacttcgccttcgccaaagaaataagcgatttcgcgagcggcagattcgacggaatcagaaccgtgggtaccgttttcggtcaggctgtcagcgtaatcagcgcgcagagtaccagccagtgcgtttgccggattggtcgcgcccagcagatcgcggtgacgctgaacggcgttttcaccttccagcacggaaaccacgatcgggccagaggtcatgaattcaaccagaccatcaaagaacggttttccatcgtgttcagcataaaagccacgtgcctgttcaacggtcaggtgcagcattttggtgccaacaattttgaaccctgcagcttcaaagcgcgcaaagatattaccaatgacgttttttgctaccgcgttcggtttgatgatggaaaaagtacgttcaatagccatttttacctctgtaaattgttctgttgttgtctgtaccagcgtacgagatggcgcggattataatgagcaacagggccgttgactattgatgaaggtaacatttttttaaaataaaatgagttttagcaacaatcagggacaaaacagattattgcatgacaaatttcactgtcgcgatttgccccacgtcatccatcaccagcaattgataatcacctttatccgtcaaatgcagggtcacgttgcgcccgcgttcagttaacggttcgccattcagaaaccaccagcgttcacctgcccctccactactttgcaacggcaaagtcgcttccgctgcgcccggtaaacgtttaataatcgcgccatcgcgaacgcctgtcagctgcagcgggagctgggcatcgtgaccgtatggcgggcaacttgtgctggccggtggtaagcgcacagcgcgacgttcacttgcgggcagccagggttccagcggtagcggccagacatttatcatttcttgtcgcgcttgcgggcaatcagcggcaacacgtttgccattttcatccagccagatggggaaacgaatgccattaatgccttcctgctccggcagtaatagagttggcggctgactcccgtccagcagccaggttgccaggcggcggcgacagttaccgtcaccttccggcaaagactgtccgcccggccagcagataacgccacgagtgacactgttcgggcgcgggtcttccggcagattcgcactgcggctcagtaagatattattgacctgattcaacaatggtacggcactggcaaagccaaactgaccaacaacgggcgtgccgtccggtctgccagtccagatcccaatgacatagcgagcgttaaccccaatcgcccaggcgtcacgatagccatagctggtgcccgttttccatgccagtggggcgacgcgcggcaaggcactatccggcaagggttgcgcttcatcagccataatccggcgaatgatccacgccgccccgctgctcattaaaggccgttcaagcagcggatcgtcaggctgtaagcgcaatttgcctgccttgccgtggcgagcaaacgcggtatacgctgccgccatatcttccagttttgcaccagcgccgccgagaatgagactaagattcggcgcagcaccgttgggcaaatataacggcaatccaacattgcgtaactttgccgcaaaccgtttcggtccataggcttccagcacctgcacagcaggtaagttcaggctgcgcaccagcgcctcgctcatgctgatcgggccatgaaaaccgctatcaaagttacctggtcgataatcaccggtgcgccgggggacgtcttgcagcagacttgccgggtggatcaagccttcatccagcgccagaccataaacaaacggtttgagcacacttcctgggcttcggatgctattgaccatatcaacatgaccaaagcgactatcatcgttgagatcaacgcttcccacccagccgcgaacacgcatatcggtatgatcaaccacgatcatcgccagactgctgcgcggtggcaaccgccctttccagttttgcgccagttcttccagacgtcgttgaagaccggcatccaacgtagtagtgattttgtcgcttttgcttttaccgagcatcatgcggctaaacagcggtgccagttgcggcatttgtcggggggccagccagatgggttcttccctactctcttttacctgctcacgggaccacacaccttgcacggccatccgttcgagcactttattacgcgcggcttcggcacgctccggccaacgatccgggcgaagacggctgggcgcttgcggcaaaaccgccagcattgccgcctcggaatagcttaaattcgcagggctttttccgagataagcccaacttgccgcaccgatcccctgcaacgtaccgccaaacggagcgcggttaagatacaaggtcagaatttcacgcttagacagatgccattccagttgcaacgcgcgccagagctggcgaattttgccgccaaatgttttggggtgaggatcaagcagacgagcaacctgcatagtgagcgtgctgccaccggaaataacccgtccgctagtgagatcttgccatgctgcgcgcgccacgctgaatggattcacccccggatgcttccagaaccagcgatcttcataattgatcagcgcttcaaggtaacgtggagaaacatcttcgattgttaccggataacgccagatgccgtcagcatcggcgaagcgccagagcggcgtaccatcctgcgccacgaccactcgtgcgggattgacttcatgcagcggtagaggccagagtttatctgctccccacgctgcaagaaaaaggagaaagggcgcggctgccaacgttatccagcagccgcgtttggttaacaagcgaggcatttacggtctgacaatcagcagatcttcagccgcgccggtcgcccgccattggggaacatacatactttccaccatcggttgcggtacctgatacgttcccggcgtcaccgcccgcgccagatacaccagcgttaccggttggtattcatcaacggcaaccgccgccacaaagcgatcgtcacggaactcaatgtgcttaatgctcgcctgctgcatctggttcagtaagttctgcacttcgccaccactttgctccaggctggcgctaccgttcgccagattctggttttccagttccagacccgcaggcagcagatccacgactaacgcatccggcacgctgttactggcttttacctgcaaccacaccagcaccagatcgccgctacgtaagctgtccaggcttttgctcttaccatcagtaccaagaatatgacgctcgatttgcagcacattgttcgccggtaaaggtgcggattgcggataaccgctggcatccatacgcaaccataacggctgatcgccactgttgctcacctgcaaggtgacaagttgatcgctattcagattgctgttttgcgctttctcgcctgtcagctgctcagcactgaaagaggtttgcgcctgccatttaccgggtaaatcctgaatcgtacgggcagccaggaacaacgcgttactttcctgcgtgcttagccagcgttcaccaaacgcctgctggctaagtgtgttcagcaaagtgtactgctcatcgggtagcagtttattttcttccagcaaggagagcattaacgcgttgtcgcgcagactactaccgtaatcacccagccatatccgctcatcactattacgcggcgttttcagcgccagcgcaatcgcttcttcaccacgcgtcgcatcacccatggttttcagcgcaacgccaagttgcagcagcggtaaaccagaagcggcatctgcacgatgctcccagatttcacgcagcgcacccagcggagccttttgctgacgggccaacaccagcgcagcgtaagactgtacggcgaatttactggctttgagattatccgcgtacgggatgctcatcatgcccggatcttgtaaatagcgcagcagacgctcattaccccggttaatggcgtctgtcggcacgctgtaaccctgttcgcctgcgcggaccaggaaatccatcacgtaagccgtcagccagtactcttcgtcaccgtttttatcccacagcgcaaagccgccgttatcacgttgcatttgcagcaaacgggaaatgccgatatcgacgcttgcacggcgtttctcatcactgtcgcctttgatgcccaacgcctgcagttgggctgcgttggtataaagactcggaaacaggccgctggcggtttgctcaagacagccgtacggatacgcttttaactctttgatataacgtgcgatgttcagcggtggtttgccgctcaacaacaattgcccttccagcgtaacagggctgaagttttgcaatccatccgccggaatcgcccatgtctcaccaggctgtaacgccgtaccgtaattaaccgtttgtgccgggaacgccggacggacgccgattttccactgcttatgctgatcggcaacggtttcacccggtaacgctaacccgctaatggtggcctgaatttctccatcgccataacccggcaatgctcgcaccgggataaacagcgtagtacgcacacctggcgctaattcaacggctgcgggactatcgctgaccagttcaagcaaaccactggcggtcagggcaacgttcagtttttgcggtttatcggtaagattagtgatatccagcgtcagacggctggtatcgccactcgccataaagcgcggcatgttcagttcagcaatcaccggtgcggcaactatcactttactttcgttgctaccgaagtcatctgccgtccaggcttgcgccatgacgcgcaattcaccgttaaaatcgccaatcggcagtgtaacgctgccttcgccctgttcgttgagcgttaccggcagcgcctgctgcacgacaatattgacgtgattgaccggcggtttaccaccacgtttcagctcatcaccatcgccaccgaaacgcagagctgccagacgcccctgaccttcaataacctgaccgtaaatatcgtaaatgtctgcgccatagcgtttctgaccaaagaacgcctgccacggatctggcgtgacgtagtcagtaatattcagcacaccactatcaacggcagacaccagcacattcacctgtttaggcttctcgccatttttagtgctggctttaattttcacggttaatggttgattgggacgcatttttgctggtgtttccagcgccagatcgaggcgacggttttcatcgccaagcggcagatgcaacacaccaaccgcgcgttttggcgtcgcggagcgagatttatcgccaggacgtaccaccagcgtacttaaatacagatcatgacgattccaggttttatcgaccggaatcgtcagatccagcccttgagcccgaacatcaatctcttgccaccacagcggcccttcactggactcgaccatcgcataacctttacccgccgttggcgcggcgatatgcaacttaatggtgtcgccagggcgataactggctttatccagtttcagcgtgacacggtcgggtcgcactgcgccgctaccgtcgctgttgtcctgccagctatagccagcccagaaacgaacactactgaccgcttcattcggcgctttgacttccagacgataagcgccccactctaccggaaaactgaccttgccggtttcgtccgctttcagatccagagtttgttcattttcgatcagatctttttgatcaaactgactctgccagccttcatcttcactccagttccagtagtaatcgcggcgttcgcgaatcaggcgcacctgcaagccgctcacggcttttttcacgccttgcgcatcgctataaacgatgtcaaaagcggcgttactgccttcatcaacaatgggctgtttcaccgtgctgtcagtacgataatcgtaaacgcttttgctggcgaactgcggacggatccccggcaatgcatcggcaggccagatagcctgctcagcgcggcgcgtcaccgggcgaccgccgctttccagcaaactaccctggaaaataacctgtaatggggaatgcgtttccttccactggctttctgtagaaacttcgccgcgccctttatcatccagcgtcaactgaacttcatccagcgtgcgggaaagattttcggcagctatatcgccgaattcaaaaccaggtaaggcactcacagcttcacgcagtgggcgcaggaaaagttgcccttgcaaagtattaccattagcaggtgcaccatacaggtagtaccccaccacggagaatttcacttcatctttcggcgttagcggggttttctcaccggtcagattcagcgccatgcgctctggcataaaatcttcgacgtggaaatcccacatccgatactgattatcgcccgtgttagcgcgaatatgccacataccggttgccgcattgctatcgagtggccaggtaaagtggtagaggccattctccggctgactaacgacgctcctgagtacctgcccatcgggtttaatcacgtctaacttgatgggttgattgggcaacgctttaccgtctgcatcacgcagcaaaccattgaggattaccgtttcacctgggcgataaagatcgcgtgggccaaacatgaaaaactgtttgctatagcctggcgcgccagcaatgttaaattctgctaagtccagcgccggaagttttaaatcgagtagcgttgtctgaccgtctttacgcgccaacagtaatgccgcgtttttatcattttccagctgcacatgcccctgagcgtcactggttgcctgagtcagagtctgccctttctcatttaataaagagacttcaattccttgctgggccgcgccgttttccagactttgggtaaagatatccagacgattgtgataacggtgagcactaacgccgatatcacttaacgtaaacagcgtcgcgggattactgtaatcgtaacgtccagcctgattcatcacagccagatacacgcccgcctgctgaagcggtttgatatcgcccagcggcagcaataatttttcacgggtgttacgcgcaggattgagatcaaaccgtccggtgtagaccagatccgccatctgcagcagtttgtcactctgccagttcgccaggctattgcggtattcccattggctaatgaatgctggcagagattctggcttaacgcggaagaagttaacatcgacattattaacgttgagcgccattaccggcagcccttcaacgactttgccaggcagcaggctaccacggctggcaaaaccgacgctgggttggatgtcgcgggtagttatagttttttcgtaatctttactgaaggttgcgttgttgagtgctttgacctccttgccaatagtaacgatcaaatcacgtttcggttcgaggtggcgtaaacgtaactctttaagattatcactcagctcccaggcaccatccactttgccgcttttttttatcgacgacatgaataacgcgactgaaatcctgatccgggtcgagagggatggagaacgtcagcaccagcgtggctgcaccatcaagttggacttcagagagatccagcaatgtcagcaccttaccggcactctgttgggccagtttttgtctctccggcacggagagttttgcactactcgcgttttcactagaggccgctttagtaacttcagaaggcgcatcttttttcaccgctgttggcgcgttatcgttgttgtcgcaccctgccagcgccagcattagcatgcaggcggctacgcgtaactttttcatttttcatccctgccacaatggcccgttagcaacgtcgaataattattatgcgtgagaatttacgttatgtaattcagtatcacgcccatacaatccgaattttagtgagaattgtggctcagacagccaaatcagcctcttttgcttgtcgcttttcactaaacatccgacaatttagcctaaccccggcaaaaatggagatgcctatgtccacgacatggtttgtaggagccgactggctcgccgaacatattgatgacccggaaattcagattatcgatgcccgcatggcgagccctggacaggaggatcgtaacgttgctcaggagtatctgaatggacatattcccggcgcagtgttttttgatatcgaagcgctttctgatcacacttccccgcttccgcacatgctgccgcgcccggaaacgttcgccgtggcgatgcgtgaattaggcgttaaccaggataagcacctgattgtctatgacgaaggtaatcttttcagtgccccacgagcatggtggatgctgcgcacctttggtgtagagaaagtgagcattctggggggtggacttgcaggctggcagcgcgatgatctgctgttagaagaaggtgcagtagagctgccggaaggagagtttaacgccgcgtttaatcctgaagccgtggtgaaagtaaccgatgtattattggcaagccatgaaaatacggcgcaaattattgatgcccgcccggctgcacgttttaacgcagaagttgatgaacctcgcccaggtttacgtcgcggacatattcccggagcactgaatgttccgtggacggaactggtgcgcgaaggcgaactaaaaacgaccgatgaactggatgcgatattttttggtcgcggcgtcagctacgacaaaccaattatcgtcagctgcggctctggtgtaacggcagccgtggttttgttagcactcgcgacgctggatgtgccaaacgtgaaactgtacgacggcgcatggagtgaatggggcgcgcgggcagatttaccggttgagccagtgaaataagtattttacaggcaataaaaaaccgccgaatttggcggttttttattgctagtctggttcgcggcctttccagcaggttgacttgtgttacatgagcaacgcaggtgcttcacagcaaaacaatactcaccagtaactctctttttgtcaagcaaaagagagtaattattgtttatttagcgtattatcgacaccggccctttccgccgtgttcggtaataaaataacctggcttattagtccgaattcagacaaatataaataaatcctgctcaaaattaaaaattctaaccggtaaaagatattacttaaacatgtaaattcactttcctttaaaaaacaaaaaaccgccaaaatcaggcggttttttgttgctggtccggttcgcggcctttccagcaggttgtattaccgtagtaatgcaagcgcgtctcagcggagacaatactcgccagtaactctctttttgtcaagcaaaagagagttattattgttctgttagtgtattatccactgcggccctttccgccgtctcgcaaacgggcgctggctttaggaaaggatgttccgtggccgtaaatgcaggtgtttcacagcgcttgctatcgcggcaatatcgccagtggtgctgtcgtgatgcggtcttcgcatggaccgcacaatgaagatacggtgcttttgtatcgtacttattgtttctggtgcgctgttaaccgaggtaaataataaccggagtctctccggcgacaatttactggtggttaacaaccttcagagcagcaagtaagcccgaatgccgccctttgggcggcatattttagattatccgattctgtttaaagtcacgcaaaaaaccaccccagcgacgttcatagaatggcgcaatatgttcggtaataaagtggctaattcctttttccccttttttcacctgacaaatatcgattggttcatcgccaggtaatgtatcggtcgctacacttcccgtcgcctgaataatttcttcgatatcaccatcggcttcaatgccaataagtaaattaggctgtgcctcttcgttctctttaatactacaaataaaagcacgcttcaccggcttaatggttttaaataaggtggtgagactatcaatcatttgtgctggcggctctgcgacttcgcttaatatcaggctttcaccgccttccaggatttcctggctgctcagcggatttccctcttcaccaatcaacaaactgatttcacgcggcataaattctttaccggttggcagtttggcattaaggaagagcgtttcgccaagtgtcatctcaaacagcgtgcgaacgggcattacgacaaatgcctgttcgtcttcaaccgcctgttgaagtgcttctaagctggtgaaaaaaggaatgacgctggtgccgtcttctttttcccagtgctgtaaatcaagcgcgctatcttcaaccacagcctcgccctgcgccgccgtaccaggcacccagacggtggattccagtagagtacggaaaaaggccgggcggtgcgccggttcagttgctgctttttccagcaggtcttcaagttcgttttttgtttcggacataagaaccacaattcattcaacgttcggggcgcaaatgcctgatgcgctacgcttatcaggcctacaagggattcgcaatttgttgaatttgcagaatttgtaggccggataaggcgtttacgccgcatccggcatattagtttacgccgttaacagattagctatcgtgcgcacaccaagtcccgtagcgcccgcagaccactgttcaaccggcgctttacggtaagtcgcgctgcagtcgatatgcagccagccttgctgatagttctcaacaaagtggctcaggaagcccgccgccgtgctcgcgcctgccggatacgccgcgcttccggtattgttcagttcggcaaagttagacggcagctggctgcggtggaactccgccagcggcagacgccagaacggttcgttctcctgcgcggcactcgccagcaagcgaccggccagcgcatcgtcaaaactgaacagcgcgtgataatcattacccagcgcagttttcgccgccccggtgagggtcgccgcatcaatgatcatttccggtttctgcgcactggcatcaatcagaccatcggcaagcaccagacgcccttcggcatcagtgttcatcacttcaacttttttaccgttgcgataggtgatgatatcgcccagcttgaacgcattgccgctaatcaggttatccgcacagcagaggaacagcttcacgcgcttgttcagtccgcgcgtaatggcaaatgccagcgccccggtaaccgttgccgcgccgcccatgtcgctcttcatgctgtccataaacgcagtctgtttgatgctgtagccgccggagtcaaaagtgatacctttacctaccaggcacgcgtacactggcgcttctttatcgccagttgggttgtaatccagcgccagcaataccggagaacgttcactaccgcgtccgactgtgtgcagccccatataaccttgctcacgcagatcttcgcctttggtgatccgataagtcacacgatcgcccgcgacgttgctgatcagatcaacagcacgctgtgccagttggcttggtcccaattcttctgccggtgcgttgatggtgtcacgcacccagtcgatgatcatcaggcggttatccagttcctggcgctgggcatcgtccagatccggccacaccactttacgcgtgcctttcggggctttgtaaccttgccagaatgcccagcagcgatccgcatcccagccttcaccgcttaactgaacatgcttgatgcccagaccgtcaatcttgcgcgccgcacgctggatcagccccagatcgtctgccccgttcaaatgcagggtaatgccgtcattattaatgctgtaagttgctttttctccccagcgcgcgtcggcaggttgggtagagagggtaatcttcatcgcttctgtcattttagttatccttctttgtaaaagggccgccagttggcagccccaggatttttccgctaaatgattcgcgttgcaggaaggcggcaagtgagtgaagccccaggagcatagataactatgtgactggggtgaacgagcgcagccaacgcatctgcggcgtgaagcatgacgcggaaattattcggcctcgtccagccagactaacaaaatcgcttcgaggattttctcgttggatgcctgcgggtcgtcgtcgaaatcttccagatcgcaaatccactgatgcatatcggtgaatcgaaccgttttcggatcaagatcgggatacgcatcgtacagtgcttcgccaatttcgcggctatcggtccacttaagtcccatactaacctctgttaatgctcacgcgcatggttgatagtgtaacgcgggatttcgactactaaatcttcgtcggtaacgcgcgcctggcagcttaaacggctttccggctccagtccccaggctttgtccagcatgtcgtcttcctgctcactgctttccggcagactgtcaaaaccttcacgaacgatgcagtggcaggtggtgcaagcacaggatttttcacaggcgtgttcaatctcgataccgttacgcagagctgcgtcgagaatggtttcaccgctattagcttccagaacagcgccatcagggcagagatcctgatgaggcaaaataacaatctttggcatattaaacctcgtccacggaatggcctttcagcgcacgacgaacgctctggtccatgcggcgagcggcgaaatcctgggtttgtttgtctacgtttttaatcgcttgttcgatggcgtcaacatcatcgccctgcgccacttcactcaggtgagcggcagcatcgtcaatgacctgacgttctgcggcgcttaacagcgcggcatcagcagccagcgcgccgtgcagactttccagcacacgcgccgcttctactttttgttctgccagcattcgggcttttacgtcctgctcggcatagctcatactgtctttgatcatgctagcgatttcgctatcggtcagaccgtaagacggtttgacctgaatagacgcctcaacgccggtggatttctccatcgccgtcacgctcaaaagaccgtcggcatcgacctggaacgtcacgcgaatatgcgcaccgccagccggtagcgccggaataccacgcagcgcaaaacgcgccagactgcggcagtcctgcaccagttcgcgctcaccctgcattacatggatagacatcgccgtctgaccatctttaaaggtggtgaaatcctgagcgcgggccaccggaatagtggtattacgcggaatcactttctccaccaggccgcccatcgtttcgaggcccaggctcagtgggatcacatcaagcaacagcatttcgctgtctggcttgttacccaccagaatatccgcctgaatcgccgcgccaatagcgacgactttatccgggtcgatggaagtcagcggtggacgaccgaaaaattcgcctacccgttcacgcaccagcggcacgcgagtagaaccgcccaccatcaccacttccagcacttcatcagcttctacacccgcgtctttcagcgcgcgacgacaagccagtaaggttcgttttaccagtggcgcgatcagttcattgaattgttcacggctgatttcgccctgccagcccgcaacgttaacggtcacggagtccgcatcgctcagcgcgattttggctgcaatggcggcatccagcagttcacgctgaacgcggttatcgctacgatcaggaatgcccgcctgctcgcgaatgtaatccgccagcagatggtcgaaatcatcgccgccgagcgcggaatcaccgccggttgccagcacttcaaacacgccgcgacttaagcgcagaatggaaatatcaaacgtcccgccaccgaggtcataaacggcgatcacgccttcctgaccggaatccagcccgtaggcgatagccgcagcggtcggttcgttaagtaagcgcaggacgtgaaggcccgccagacgcgccgcgtctttggtgccctgacgctgggcatcgtcaaagtacgccggaacggtgataactacaccatccagctcgcctgccagggcttcagttgcccgcgccgccagtgctttgaggatgtccgcagaaacgcgcaccgggttcagcagccccgccgccgtttcaatcatcggcaggccgttttcgctggcctggaattgataaggcagatgcggatagcgttgctggatatcagccaggctgcgtcccatcaggcgtttaacagaactaattgtgttggcggtatcgagcgctgcattagtacgcgcgtcataacccacgctatgcccttgctgttgatagtgaacaacagatggcagcaggtgacggccttcatgatcggctaacgtttcggcctgaccgctgcgcactgtcgccaccaggctgttggttgtgcccaggtcaataccggccgccagacgacgctgatgcggcgcagcactcaaaccaggttcactaatttgtaataaggccatgtttagcttccagaaattaaaaatcgagcagtttttcttcgagttgttcggcactgcttcgcagtttatcgagaaaacgcagcttacgcacggtatccgccgccgcgtcccacgtctcgttgtctaactgttcaaccatcaactgatggcgggtatcaaacatctttttcacacgtttgataaagctttccagccgcgcttcatctttcgcctgttcgatctcgtccagctcttcgcgcagctccaactgttccatcaggaacgcggtgtcgcgcacagtatgctgctcgctggcgagatcaaagccgtgcaaagaaagcaaatattccgcgcgcattaacggatgacgcagcgtttgccaggcctggttaatggttgcagattgctgtacggcggcgagttgttccgcctggcttccgctggcgaatttatcaggatgatactgacgttgtagatcctgaaaacgcaggctcagcgcctgggtatcgagttgatagcgggcaggcaagccaaagagggtgaagtaatccataacattctcagggctgcgatccgccgcgataacggcgaatcaggtaaaacaaaccccacgcgcaggcgaccacggtggggttatcggtatgcgcatcaaacgtggaagctttcgccgcaaccacactcatctttgacgttcgggttggtgaatttaaacccttcgttcaggccttcttttacgaagtccagctgcgtaccgtccagaaattgcaggctcttgccatcgaccacgactttcacgcctttgtcttcaaacacgatgtcttccggcgtcggttcgtcaacaaattccagtacataagccataccactacacccggaggttctcacgcccagacgcaggccaaaccctttaccgcggttagccagaaaggtatttactcgcgctgctgcactgtcgctcagtgtaatgctcataaccaaacctcaactcttattttgcttcacgtttgcttttatagtccgcaatggcggctttgatcgcgtcttctgccagaatagaacagtgaattttcaccggcggcagttcaagttcttcagcaatatcggtgtttttgatcgcctgcgcttcgtcgagagacttccctttcacccattcggtgaccagggagctggaagcgatagcggaaccgcagccgtaagttttaaaacgcgcgtcttcaatgataccttcatcgttgactttaatctgcaacttcatcacgtcgccacaggccggtgcccccaccatgccgctgccgacgttctcgtcgttgttgtcaaaggaacccacgttacgcggattctcgtaatggtcgataactttttcgctgtaagccattataaattctcctgattccgataccgattaatgatgagcccattcgatgctgttcagatccacgccctgcttgtacatttcccacagcggagaaaggtcacgcagacgaccgatggatttacgaactaactcgatggtgtagtcgatctcttcttcagtagtaaaacgacctaaagagaaacggatagagctatgtgccagctcgtcgttcagccccagcgcgcgcagcacgtaggacggttcgaggcttgcactcgtacaggcggaaccactagaaactgcgaggtctttcagcgccataatcaggctctcaccttcaacgtagttgaagctgacgttgagaatgttcggcgcaccgtgttccaggtcaccgttcaggtaaacttcttcgatatctttgatgccgttccacagacggttacgcaggccgcgcagacgttccatctcggtcgccatctcttcttttgcgatgcgataggcctcgcccattccgacgatctggtgaacaggcagagtgccggaacgcataccgcgctcgtgaccgccgccgtgcatttgcgcttcgatgcgtacgcgcggtttacgacgtacatacagcgcaccgatacctttcgggccatagattttgtgaccggagaaagacatcaggtcaactttcaactggctcaggtcgataggcagtttacccacgctctgggttgcatcaacgtgatagataatgccacgagcacggcacatttcgccgatagccgcgatatcctgcaccacgccgatttcgttatttacgtgcatgatggacacgaggatggtgtcgtcacgcatcgctgcttcaagttctttcaggtcgataatgccgttacgctgcggtgccaggtaggtgacttcaaaaccttcgcgctccagctgacggcaggtatccagtaccgctttgtgttcggttttgctggtgatgatgtgcttgccttttttctgataaaagttggctgcacctttgatcgccaggttgtcagattcggttgcaccagaggtaaagacgatttcacgcggatcagcgccgaccagatcggcaatctgattacgggcgatatctaccgcttcttcagcctgccagccgaaacggtgagaacgggaggccgggttaccaaaggttccgtccatcgtcataaactgcatcattttctcggcaacacgcgggtccaccggcgtggttgcggagtagtcgagataaatcggtaatttcattgctctataaactccgtacatcactcaatgcaaggaatcaggctaccggctggatgtacgaccgtgtttacggagtatttagcactccggcctgattctgaattctttttattaagcgcgtaacttaacgtcgatcgcgtcttgtgtgcgggtgcgtggcgcgtcgtgagtatgctgacgaccagacacatccagcacttcctggttattaaccagttcgcctaaagtaatgttgttgagaaaaccggtgagacggtcgctcaaatcacgccacagcgcgtgggtcaggcatttatcgccgccctggcagccgcctttaccctgacaacgggtggcatctacagattcgtcaacggcgctaattacttcgccaacggcgatgctgctggcatctttgcctaacagataaccaccgcctggtccacgtacgctggaaaccagaccatttttacgcagacgggaaaacagttgttccagataagaaagggaaattccctgacgttcggaaatatcagccaacggtaccgggcccgcttcagagttgagcgcaacgtcaagcattgcggtcacggcatagcgccctttagatgtcagtctcatgtcttacttcacctcaaactcgcccctgcccggggttttttattgtaaaagtgggggtattgcatagcagggtcaagtctgacattcccgagtaaattggtcaactatttacttgactgatttagtcgggtatttaaccttcagtgccatttttttatcgtggcgtttgtacctgttgtcggatgcggcgtgaacgccatatccgccctggggttctgtacactgtaggcctgataagacgcattacgcgtcgcatcaggcaacggctgtcggatgcggcgtgaacgccttatccgacctacggttctgttcactgtaggcctgataagacgcattacgcgtcgcatcaggcaacggctgtcggatgcggcgtgaacgccttatccgacctacggttctgttcactgtaggcctgataagacgcattacgcgtcgcatcaggcaacggctgttattcggccttgttacctttattctgctgctcaatagaagccagaatcccgcgcaggatattcaactcctggctttccgggcgcgcacgggtaaacagacggcgcaatttattcatcacctgccccggatggttttcacggataaaaccggttgccagcagcgtttgttccagatgaccataaaaacgctccagatcatcgaccagcggatacggcgtctcttcatgctcgacctgctcgccgttttcctgagttgccagccaggccatgcgcacttcataggcaataacctgaaccgccatcgccaggttcaggctgctgtattccgggttagccgcaatcgcgacatgataatggcatttctgcaactcttcattggtcaagccgacgcgctcgcgaccaaacaccagcgccaccggggtatttgccgcttcagcgacgcttttcaggccgcattcgcgcgggtcgagcatcggccatggcagcgtgcgggaacgtgcgctggtgcccaccaccaggctacaaccggctaacgcttcgtcgagcgtatcgacgatgtgagcattaccaatcacatcgctggcccctgctgccagggcaatcgcctgggagtcgggtttcaccagtggattaaccagccacagattggttaatcccattgttttcatggcacgggcaacagaacccatattgccggtgtgactcgtctccaccagcacaattcgaatattttgcagcattgtctttcttcatctaaagattattcacgcatcttatcataaaacgaagacagatgccgatctcgctgctatactctgcgccgttttcccgttctttaacatccagtgagagagaccgatgcatccgatgctgaacatcgccgtgcgcgcagcgcgcaaggcgggtaatttaattgccaaaaactatgaaaccccggacgctgtagaagcgagccagaaaggcagtaacgatttcgtgaccaacgtagataaagctgccgaagcggtgattatcgacacgattcgtaaatcttacccacagcacaccatcatcaccgaagaaagcggtgaacttgaaggtactgatcaggatgttcaatgggttatcgatccactggatggcactaccaactttatcaaacgtctgccgcacttcgcggtatctatcgctgttcgtatcaaaggccgcaccgaagttgctgtggtatacgatcctatgcgtaacgaactgttcaccgccactcgcggtcagggcgcacagctgaacggctaccgactgcgcggcagcaccgctcgcgatctcgacggtactattctggcgaccggcttcccgttcaaagcaaaacagtacgccactacctacatcaacatcgtcggcaaactgttcaacgaatgtgcagacttccgtcgtaccggttctgcggcgctggatctggcttacgtcgctgcgggtcgtgttgacggtttctttgaaatcggtctgcgcccgtgggacttcgccgcaggcgagctgctggttcgtgaagcgggcggcatcgtcagcgacttcaccggtggtcataactacatgctgaccggtaacatcgttgctggtaacccgcgcgttgttaaagccatgctggcgaacatgcgtgacgagttaagcgacgctctgaagcgttaatgactcaggcgggtgatatcactcacccgccctcgcctttcaggcgctattccgaaatacttcctcactgctttactttctttcgtcactctcccaccatctttccccgattaatggatgataaagaagagccaaggaaaggttatggcactgccagtgaacaaacgcgttcccaaaattctgtttattctctttgttgttgccttctgcgtttatttagtgccgcgcgttgccatcaacttcttctattatcccgacgataaaatttacggtcccgatccctggagcgcggaatccgtcgaatttacggctaaggacggtactcgtctgcaaggctggtttatcccttctagcacgggccctgctgacaacgccatcgcaaccatcattcatgctcacggcaatgccggaaatatgtccgcccactggccgctggtcagttggttacccgagcgtaatttcaacgtttttatgtttgattatcgcgggtttggtaaaagtaaaggcacgccgtcccaggccggattgctggacgatacgcaaagtgccatcaatgtggtgcgccatcgcagtgatgtaaacccacaacgtctggtgctgttcgggcagagtattggcggggcgaatattctggatgttattggtcggggtgatcgtgaaggcatacgtgcggtgatcctcgactccacatttgcctcttatgcaaccatcgccaaccaaatgatccccggcagtggctacttacttgatgagagttacagcggcgaaaattatatcgccagcgtcagcccgatcccgcttttactcattcacggtaaagctgatcacgttatcccatggcagcacagcgaaaagttgtatagcctggcaaaagagccaaaacggttgatcctaatcccggatggcgaacacattgatgctttttccgatcgtcacggcgatgtttatcgcgaacagatggtggactttatccttagcgcgttgaatccgcagaactaacccatgatcgctagcacgataatcattcacaaaaccaccttaagacatgctaatccactggtcagaacagtttaagatgagaaaaattctgtgacgcttgccaacatttctgatgattagcattcccttcgccatttccttgagcaaactttagctattcttatcaattatgcttatgggagatctacagatgatgcctacgcttgctccaccatctgtccttagcgctccccagcgccgctgccagatcttgctgacgctctttcagccggggttgaccgccaccatggcaaccttcagcgagcttaatggtgtggatgatgatattgccagtcttgatatcagcgaaacaggacgggagatcctgcgctatcatcaactcacactgacgactggttatgacggtagctaccgggttgaaggtacagtgcttaaccaacgtttgtgtttatttcactggctacgacgtggtttccgtctgtgtccgagttttattaccagccaattcacccccgccctgaagagtgaactgaagcggcgcggaattgcgcgtaacttttacgacgataccaatctacaagcgttagtgaatctctgctcccgacggctgcaaaaacgctttgaaagccgcgatattcatttcctgtgtctgtatctgcaatattgtttgctgcagcaccacgctggaattacgcctcagtttaatccgctccaacgtcgctgggcggaatcctgccttgaatttcaggtagcgcaggaaattggacgccactggcagcgtcgggcgctccagcctgtaccacctgatgagccactgtttatggcactacttttttccatgttgcgggttcccgatccattgcgggatgcgcatcagcgggacagacaattgcgtcagtctatcaaacgtctggtaaaccattttcgtgagctgggaaatgttcgtttttatgatgaacaggggttatgtgatcagctttatacccacctcgcccaggcgttaaatcgcagtttgtttgccatcggtattgataataccctgccggaagagttcgccagactgtacccacgcctggtgcgcaccacccgcgcggcgctggccggatttgaaagtgaatacggcgtccatctttctgatgaggaaagtggtctggtcgcggtgattttcggtgcctggctaatgcaggaaaacgatctgcatgaaaaacagattattcttcttaccgggaatgatagcgagcgagaagcgcagattgagcagcagttacgcgaactaacgttactgccgctcaacattaagcatatgagcgtaaaggcatttttgcagacaggcgctccgcgtggcgcggcactgattattgcgccttataccatgccattaccgctctttagtccaccgctgatctatacggacctgacgctgacaacacatcaacaggagcagatccgcaaaatgctcgaaagtgcatgatcagcaactgggaacaactttcgggcgcaaaaacattgccggaagcgccaccagcgccattacccagaacacgccgtggcccagatattgatacaggaaaccggcgaaaacggtcatgatagcgatactgccgcccatcgcgacggcagagtaaaccgcctgtaaacggatgacttcgctaccctggcgagcagcaatataacgcatggcggccaggtggcagaccgtgaaggtgccgcaatgcagaatttgcaccactatcaaccacggcaacgccgtagttgctcccataatgccccagcgcactacgccgcaaatcgcgctgatcaacagcatatcgcgtgcactacaacggcggaaaagtttattactcagcgcaaagataatgacttccgccaccacgcccaggctccacaaataccccaccgcgctggcgctgtagccagctgcctgccagtaaatggcgctaaaaccgtaataggccgcatgtgccccctgcaataaacaaacgcaggccagaaagcgccagttctggcgaaccagcgccaaccacgcagaccaaccggtgctctcctgctggcgacttgccccttgtggctgaatcgtcggacggatgagaaagccgagcagcatggatgccacgcccaacgtcaacagcgcgaggatcacccgataatcaaacatagtgaccagtttgcccgtcagcgcgctgccaatgacaaacgccacgctgccccacagtcgcactttgccgtaatcaagcgggaactgcttttgccacgtattcgccagtgcatcggtcaacggtaccagtggactgaaaaagaggttaaagccaatcatcaccagcatcagccacgctacgtgcgcccccgcccagaaggcgacagcaaagagaagtgtcagcagtgccagcacgcgcaaggcggaaatcaggcgggaaggatcgctgacgcggggcgcgatgagcaaactcccgaggaaacgggcaaccagacctgcccccaataacaggccgatggtttctggcgttaaaccaatccctttaagccagacgctccagaaaggtagaaaaatgccgtaactaaaaaagtatgtgaaatagccgagcgccaaccagcgcgtggattgcaaaaccatgagtccctcccgtcaggaggcgttagtctggggttaatcgaatgttggtgcaagttgaaaaataagaatattcgagcctgcttcccgatgtctgtaacgccagttcacaagcactaaaaaactgagatccgcgacgcatgttgcaaaaataatgcgtaattatgccgttacgcttgccaaacgttcctgcacaatggcgatgaaatcgcgtaatgccggcttcatctcccctttcttccacgccatcagtaaagcaatggaaggcacatttccggcaatgggacgaaaaacaacctgtccggtattaaaattattcatataaccgggtatcaaagtgacgcccagccccatgcccaccagattcatggtcaccagaatattcgttgccacctggacgatatttggctggctgttttcttgcgcaaaccacgctttaacgatcggcgcaaggctaccggaatacaccggatcggtactgacgaaattcacgccatccagttgcgcggcggtgatctctttttcatgtgctaaagggtgatcaaccggtaacacaaccactaatggttcgtcaaaaagctccagataatcaatctccgggctataaacaggatggcgcattaagccgacgtcgagttcaccacggcgaattttttcctcctgttgcgtggtgattaaactcaccagctcaatcaaggtgtctggctgtctgagacgaaacatcggtaatacttttggcagtaaattcacttccgcgcttggcacaaagccaatggttaattgtctgtcttcctgaacaattttccgcgcccgtaatttggcattttccgcttgttcgaggattgccagcgcgtcctggagaaaacattctcccgccgccgtcaacgcgactttgcgcttatccctcaccagtaacggaacaccgacacagttttcaagatcgcggatctggctgcttaagctaggctgactggtatgcagtttttccgccgcacgggtaaagttcagtgcctgcgccactgcgacgaaatagcgtaaatgccgtagttccatcaccttccccttgttatcgaaaaaacgtctcagctggtagaaattaactatttcacatattagcaaccaaccagcaacatccttatggcacaaaaatagaaggtcaatacatcttatctttcaggattaaaaaatatgaccacacccagtgatttgaacatttaccaactgattgacacccaaaatggtcgggtcactccgcgtatttataccgacccggatatttaccaactggagcttgagcgtattttcggtcgttgctggctatttctcgcccacgaaagccagatcccaaaacccggtgatttctttaacacctacatgggagaagatgcggttgtcgtagtgcgtcagaaagacggcagcatcaaggcgtttctcaaccaatgccgccaccgggccatgcgtgtgagttatgcagattgcggcaacactcgcgcctttacctgcccgtatcacggctggtcttatggcattaacggcgagttgatcgatgtaccgctggaacctcgcgcctacccacaagggttgtgtaaatcccactggggactaaacgaagttccttgtgtggagagttataaagggctaatttttggcaactgggataccagcgcaccgggcctgcgtgattacctgggtgacattgcctggtatctggatggcatgctggatcgtcgcgaaggcggcaccgaaattgtcggcggcgtacaaaagtgggtgatcaactgtaactggaaattcccggcagagcagttcgccagtgaccagtatcatgctctgttcagccatgcttctgccgttcaggtattaggggcgaaagatgatggcagcgataagcgcctcggtgatggacaaaccgcccgcccggtgtgggaaaccgccaaagatgcgctgcaatttggtcaggacggtcacggtagcggtttcttctttactgaaaaaccggatgctaatgtctgggtcgatggcgcagttagtagctattaccgcgaaacctatgccgaagcagaacaacgtttaggtgaagttcgcgccctgcgcctggcgggtcataacaatattttccccacgcttagttggctaaacggcactgccacactccgcgtctggcatccgcgcggccctgatcaagttgaagtgtgggcgttctgtattactgacaaagccgcctccgatgaagttaaagccgcttttgaaaacagcgccactcgtgcttttggtcctgctggttttctcgagcaggatgacagcgagaactggtgtgaaatccagaaattgcttaaaggccaccgcgcccgcaacagcaaactgtgtctggaaatggggcttggtcaggaaaagcgccgcgacgacggcattcctggcattactaactatatctttagtgaaactgccgctcgtggaatgtaccaacgctgggccgatcttctgagtagcgaaagctggcaggaagtgctcgataaaaccgccgcttaccagcaggaggtgatgaaatgagtgcgcaagttagtctagagttacatcaccgcattagccagtttctctttcacgaagccagcttactggacgactggaaatttcgtgactggctggcgcagctcgacgaagagattcgttacaccatgcgcaccacagttaacgcgcaaacacgcgaccgccgcaaaggcgtccagccaccgacaacctggatttttaatgacaccaaagaccagctggagcggcgaatcgcccgtctggaaacgggcatggcctgggcagaagagccgccgagtcgcacccgtcacttaatcagcaactgccagataagcgaaaccgacatcccaaacgtatttgctgtgcgggtaaattatctgctttatcgggcacaaaaagagcgcgatgaaacattctatgttggaacgcgtttcgacaaagttcgccgtctggaagatgacaactggcgcttgctggaacgggatatcgtcctggatcaagcggtaatcacttcccataacctgagtgtactgttctgatgaatcgaatttatgcgtgtcccgttgcggatgtgccggagggtgaggctctccggatcgataccagccccgtcatcgccctgttcaacgttggcggcgagttttatgccattaacgatcgttgcagccatggtaatgcgagtatgagtgaagggtatctggaagatgacgccacggtggagtgcccgctacacgccgccagtttttgcctgaaaacggggaaagcgttatgcctgcccgccaccgatccgctcaccacttatccagtacacgttgaaggtggtgacattttcatcgacttaccggaggcgcagccatgagcgatctgcataacgagtccatttttattaccggcggcggaagcggattagggctggcgctggtcgagcgatttatcgaagaaggcgcgcaggttgccacgctggaactgagcgcggcaaaagtcgccagtctgcgtcagcgatttggcgaacatattctggcggtggaaggtaacgtgacctgttatgccgattatcaacgcgcggtcgatcagatcctgactcgttccggcaagctggattgttttatcggcaatgcaggcatctgggatcacaatgccagtctggttaatactcccgcagagacgctcgaaaccggcttccacgagctgtttaacgtcaatgttctcggttacctgctgggcgcaaaagcctgcgctccggcgttaatcgccagtgaaggcagcatgattttcacactgagtaatgccgcctggtatcctggcggcggtggcccgctgtacaccgccagtaaacatgccgcaaccggacttattcgccaactggcttatgaactggcaccgaaagtgcgggtgaatggcgtcggcccgtgtggtatggccagcgacctgcgcggcccacaggcgctcgggcaaagtgaaaccagcataatgcagtctctgacgccggagaaaattgccgccattttaccgctgcaatttttcccgcaaccggcggattttacggggccgtatgtgatgttgacaagccggcgcaataatcgcgcattaagcggtgtgatgatcaacgctgatgcgggtttagcgattcgcggcattcgccacgtagcggctgggctggatctttaaggaagcacgatgaaagaaaaaacgatcattattgtcggtggcgggcaagcggcggcaatggctgcggccagcctacgccagcaagggttcaccggtgagctgcatctgttttccgatgagcgacatcttccttatgaacgacctccactcagcaaatccatgttgctggaagattccccgcagttacagcaggtgttacccgctaactggtggcaggaaaacaatgttcatctgcattccggtgtaaccatcaaaacgctgggtcgcgacacacgagagttagtgttaaccaacggcgaaagctggcactgggatcagctttttatagcaaccggcgcggcagctcgaccgctgccgttgcttgatgcactgggagaacgctgctttaccctacgccatgccggtgatgccgccagactgcgagaagttctgcagcccgaacggagtgtcgtgattatcggtgccggaactattggtctggaactggctgccagcgccacgcagcgcagatgtaaggtgacagtgattgaactggcggcaaccgtcatgggccgtaatgcaccaccgcccgtgcaacgctatcttttacagcgccaccagcaggctggtgtgcgcattctgctcaataatgccattgaacatgtggtcgatggtgaaaaagtagaactgacgctgcaaagtggggaaacgcttcaggctgatgtggtgatttacggtattggtatcagcgccaacgagcaactggctcgcgaggccaaccttgatactgccaatggcattgtcattgatgaggcttgccgcacctgcgatcccgcgatctttgccggtggcgatgtggcaatcactcgtcttgataatggtgcactacaccgctgcgaaagctgggaaaacgccaataaccaggcgcaaattgccgctgccgcaatgttagggctaccgctaccgctactgccgccgccgtggttctggagcgatcagtacagtgataacttacagtttattggcgatatgcgtggcgatgactggctttgtcgtggcaacccggaaactcagaaggcgatttggtttaatctgcaaaacggcgtgcttatcggtgcggtcacgctgaatcaggggcgtgagattcgcccaattcgcaaatggatccagagcggcaaaacgtttgatgcgaaactgctgatagatgagaacatcgcgcttaaaagtctgtaaccaggataattagcgaatatctcaatgcctggggcgtggcgaggtgcaagagtgtgtattacgtttaaaagtcattatcttgcaaagggattggttatgaacacactacgttattttgattttggagctgcccgccccgttttgttattaattgcccgtatcgccgtggtcttaattttcattatttttggttttcccaaaatgatgggctttgacggtacggtccaatatatggccagcttgggcgcgccaatgccgatgctggcagcgattattgcggtagttatggaagtgcccgccgcgatattaatcgtgcttggctttttcacccgtccgctggcggtgctgtttattttctacacgctgggtacggcggtgattggtcaccattactgggatatgaccggcgatgcggttgggccaaatatgattaatttctggaagaatgtcagtatcgctggcgcgttcttgctattggcaattaccgggccgggggcaatttctctcgatcggcgttaagaaagatgccggatgcggcgtgaacgccttatccggcatttaataaattacagccactctacccgcaagctcatctcactagttgtactttcccctggtgctagcgcaatgagatcacccccttccgggcgatgatgatcatccggcgcatggctcatcggttccagacagaagaaatcaaacgcatatcctttatcaaacgcagggtcggaaacaaagatgaaataacacggtgcaggtggcgtcgtttccatgatgatggcataaccttcctgcggctgctcgatgcgggcctgaccattccatccggcaaaaccattgttcacccactggcgcggcaacggcgcgggctggttaaaatccagttcctgcggtagctgctcgcaaaactcacccgccagccactgctcccgctccagccagtaaccgctcgcctgtgcctgaatccgcgtttgcgggctcaacggaaaataaggatgccagccggtaccaaatggcagcgtctctgccccttgattggtgacagagagcgtcaccgtcagcgtatccgccgttaaatgaaacgcctgacttacccgatagtgatagacaccgctgcgatgttcatacaccagacacaaactatcatcgctgtggctgacacattgccactcgcccagccagccatcgccgtgtagatagtgcgcatcccactcaacattcggttgcagttgatactcacgcccctgccagacaaaacgattgccgctcacccggtttgcaaatggcaccagcggaaaacaactggcatcggttgccacaccgctttttttaccaggacgtaagagcggcgtcgtatcgcgccagaagccttcgattacgccgccctggtcagaaacgtccagctttaggctcccgtgggataaggtatagatggtcatccgctaactccttaatccgggaagttaatcacaactttcccgcatttgccgctcgccatcagcgcataggcatcacctgcctgttccaggctgaagcgatgggtaatggcgttacgcggccacagcttccagtccgtcagatcatgggcgcatttttccatatggaacagactggtcacccaggagccgataatccgccgttgatggtgcatcagatcggcgctgacctcgaattccacttttccggtttcaccaatgtaaaccacccgtccccagtcagcggtggattgcagtgccagcaagcgacctgcggcattaccggaacaatcgagcgcaacatccgcgccaccgtgggtgagttcggcgataatctgcggcagaccttcggtggttgctaaatagccgtgatccatcacccctaactgttttgccatcgccagacgttccggcagcatatcaacgccgatgatccgttttgcaccgcgacctttcgccagcatcatcgccatcatgccgactggccccagaccgaccaccagcacgttatcactgccggaaacttcgccgcgcaaaattccttcatacgctgtaccaacgccgcaactgataaacgcaccatcttcgtagctcagcgcatccggcaggaggatcagatctttttcttccgccagcaagtattcggcatgaccgccgtcacgctgccagccgtaagccgcttttccttcgccagtacaagaaataggaaaaccgcgacggcagttcgggcaaaaaccacagccagaaatgtgatacaccagcacgcggtcgccctctttaaaatggcggcagccttgccccatcgccacaatctgcccgcacggttcatgaccgttgataaagccctggtataacggtttatcgggtgccgccgctgtggcacggtgttgatgatagatatagtggacatcgcttccgcaaatcccggaggatttcattttgatcagtacctggttaatccccggcgtcggcaccgcaacttcccgcagatcgacggtgctatttcctggtaaataagctgccagcatcgttttcataaatccctcattaacaatacgattaattttcatccctgccgcacccgcgccaggggcgttaaggtttagcgtttcgctttactgcttcgctgggtcagcaagatattcgccagcaccgccaccacgatgatgacgccgcgtaccacctgctggaaaaaggagttaataccgagcagcaccagaccgttaccgattagcgtaatcaccagcacaccaagcaatgtaccgaacagggaaccgcgaccgccggaaagtgccgtaccgccgaccacgaccgcggcgatgacgtcaaactccagaccgtttgcggcacctgcgttaccagaaccgaggcgcgccgccaacaaaatgccggtcaccgccgctaataatccgctaagggtaaagataagaatgcgcacccgacgaacgttgatgccgcacaactgcgccgccgtagcattaccgccaacggcaaaaacgctgcgcccgaaggcggttttgcggctgatgaacacaaacagcgcaaacaacacaatcatgatcagcgcggataccggcacaccgagaaattgtccgcccagccagtccagcacctcgttttcatcaatcggcactggcagtgcgttcgtcataaacagccccattccgcgcagggcgctccacagccccagtgtggcaacgaaacttggtacattaaacacgccgcgcagcaccccggccagcgttcccatcagcgcgcctaacagcaacaccagcaggcacgccaccgccagcggaacttcaaattgcagcaaaaatgccaggcacacgctgacaaaagccaccatcggcccaacgctgacatcaatttcaccggagataataatcagcgtcatcgcccaggcggcaatcccaatggtggcggcatcgcgcagcacgttcatctggttattcaaactgataaagccaggcgcgttcagggagaagaccagataaagaatggcaatcaccaccagcaaaccgatctcattaatatggcgactgacaaattgtttgaggctgacgctcttgccctgcggcaatggtaaactgctagcagacatcttcaggttcctcggtaaaattcatcagtgcacagacagaatggcggacatcagctcatccacattgaccggagcgtgaaactcctggctgaacgtgccgtgctgtaataacaggatgcggtcacacaccagcggcaactcctccacttcactggagataaacaccacgctttttccttcggcagccagctcacggacaatacggtaaatctgctgtttggcttcgatatcgacgccgcgcgttggctcgtcgagcaacaaaatctggctggcagcatagacccaacgaccgatcaccactttttgctgattgccaccagaaagcgtgccgatgggtgtttcgctactggcggccttgaccgtcatccgctgcatcacctcttcggtcaggcggcggatggtggaccattgcagcacaccgttggcgctgattttttgccgattggtcagcactgtattttcgtcaacgcccaaccagggaatgatccccgcttctttgcggttttctggcgtatagccaatgccgcgtttcagcatgtcgccgtaatcggggcgcgtgattttctcgccgttgataacaatttcgccctgttcatactcctccagcccaacaatcgccttcagcaattcactgcgccctgcccccagcagaccagcaatgccgagcacttcgccacgacgtagcgtaaaactgatatcctccagcttgggcttatggcgtaacgcacggacttccagcacggcctgatccacaatttcctgaggggctaccggcgcaatatcaacgtgatcgcgcccgagcatcaggctcacaatatgatgcgtggaggtgttttcgagcatcacatcgcccgccacctgaccatcgcgcataacggtggcacaggaggcaatgcggcgaatttcttccatccggtggctgacataaatcaccgccacgcccagtgcgctcatctttttcaccgcgctgatcaccagttcaacttccgcactcgcaaggctactggtaggttcatcaagaatgaccacgcgcggctcgcccttcatcacccgcgcaatttccaccagctgcttttgcgccgggcttagcgtactaacaagttgttcaggactaacgtcaacgcccagcgcctgtaagcaacgttgggcatcctgcgccatttgcaggtaatcaatcatgccgttgcggcggggccactgaccgaggcagaggttttccgccactgtcagcccttccaccagacttaactcctgataaaccgcgcgcacccccagttcagcggcacggcgagtcagcgtagcttcgtcaccttccagtcgcgtctcgccaatccagatatcaccgctatccgggcgttcgctgccggtaagcattcgaatgagagtgcttttgcccgcgccgtttttacctaacagcgcacgaacttcgcctttattgagcgtgaagttaacgttatccagcgcaacgacgccgggataacgcttatttcctgccaccacttttgctaccgggactgcctctgttgccgtgaacatagggacctctgcgaatcagcgattagggcagaccatcaacgtgcgttgccagccactgtttaccgtcttccgttttggtatagagatcgataggcacctgaatcactttttcaccgtcggcttgtttattgataaccttcaatgtttgcgcgaaaacagcattgcccattttcttaccggaaatatccactaccgctttcagcacctgattgttttccagctcctgagcaatttcggttgtcatatcgctaccgaaaacagcaatttttccggcctgattttgattacgtaccgcttttaccgcgccgagtgtcgcaccgccgctttcccccataatggcgttgagatccggcgtggagataattagtttttcaccaacggaaatcgctttatctaaaacagtcccttcctgattagcgacaatttgcgcgccgggaacgcgggattttaaaacttcttcaaatcctttacgtcgctgcacacaaacttcaaaggcttcgcaattgatgacggcaattttcggctggtcaattttattggcaataaaataatcagcggcagcgttacccagttttttaccaaattccagcggatcgccgaccagatacgcgctgacatatttatcgacccccttttgattaatacaggtgttgtagcaaatcaccggaatgcccgcttcactggcgcgacgaacggtacggctactgccattttcagacactgcgcttaaaataatggcatcgacattacgcgccacgagggtatcaacaaaggtactttctttgctaatatcaccctgggcgttagtttctattaactgaacttgtacactggaatcttttgccgcatcctgaacgccctgacgcactccagcgtagtatccctgagtatcaaggtatattgcgccaatggtcatttctttttccgcagccctggcaaatagtgcgctacctaatagcgtagccattaataatagattacgggttgttctcatttttgtaggcatagagcctcctgtagggtttttattaacaacggcttattctaattattttgtgatgagcggcagcgcgtgccgctcaaatattacagttaatagggtttagtgaacgcggttaaaaataaaaggcatcacggtggtgaataatgccgctttcggccaagccggattaatcgccgtcaattcagcgcgagcagactcatattgcgcaacctccccgagtcccgcggacgccagcatcgccaccatcaggcatttttctttatgctgctgttgtaaatcgccatacaggctcaacaagtcaggttggctgacggcaaagaaatccgcttcgatactggttttcgccatctcttgcgcccactgtttcatttcactaaacagttgctgtgcggtttgttgttcgcccagcagtcgcagcgccatcccttgccagaagagataatcaaccggctgatcgttgtaataactgtgaatgttaatagtgcgatcgccggtcgccgccagacgtaaacaacgcgtcgcttcagtttcatcgccctgcgcgttggcgcatatcgcctgccagaaccagatgtcgttatcagtttgccccggtaaacggccttcgcttaaattctccggataatgcagcgcggcatgaagcagttcgcaggcctgctgcggctgtctggcatcaagatgctgccaggcgcgtaataactggttgaggataaactgactggtgaccttcccttccccgccttcccacgggtggaatttgcgcgtggcgagaatgtccgccgctttgtctgcctgacccgtgagatgccacaaattgagcagttctgcggtcatgtcgtcgcgtttcagcgcaatttccagattattttccagacgcgccagtcgtttctccggtgtggctccacttaacttatccagcaaatcccgttcgaaaagcagacgtgcatcctgcggcgcaagctgataagcattatcaagataacgcgcggccagctcataatcgtgttgcttattccacgcatggatcgctaacccgcgccagccgtcggcaaactccgggctcatctctacgcaacgttgccaaaaggcaatggctttgttgtagctacgtttgttgtagtagaagcaagctagtaaatggcgagcaaaccagcactcttcaatactctccagcgccgccacttcttccagcgtattcgggaaacggacaaactgcgggaagacatcaatggcttttgcgaccagttcgccacgttcggctttcggcagcaagctggcttgcaggtaaagcggcagcgtgcgctggcagtccagtgcgttcagcatctctgccgccagggtgggcattccccagttaatcagttgcccggcggtcatcagggcgttaacgtcgcgtccctgacacagaccgcgccactgcgcgagagcactttcgctacgaccatcgaaccagttcagccaccacagagtggcgttcagcggataatcgcgcagcagtttctcgcgctgcacacgcgcgttgtcctgacgaccacttaacaccagcagcagattatgcaggcaaagcacttcctgattggttgggcaggcgcgaagactttgttggcaaaaatccagaccagcgtcgaagttaccattacgcgccgccagtcgtgccaggccataatagccaccggctttgctgttgccgctccagaccgcacgccagaaatcctcttcggcttgttgatattgtccctgacgttcgtaagcactggcgcgaatcaaactcgcctgtccgcactgcggatttttgttcagcgcatgtgcgcgtttcagagcctgagtggcatacgccaccgcttgcgggaaatctgcgcggttatattccagcatcgccagcgccaggttacagcgataatccagcgggtccagcgccacgccgcgcaggtagtaatcgaacggactacggctggcgtgatgatattgctccagatgctgaccgataaaccaggcttcatctgtactggtaatgtcttgtgctgccagtggcgctttggcgacgtccggtaacggcaacgcttgcggctgatgttcctgataactcagtacaatattgccgtcggcatcggagagctcaatggtcagcctttcaggattgataccgtgcaacacgccctggatggcggtcgcaggcatcagtgccacggcatcatcaagtaacgcgttgcatttaccgatttcgcggatcgccaggcggtatccgttcaacggagagatggcatacagcccccactcaatcccccgcttactacgctggagttttatcaccgcatcgcgggaggcattttgcaccatgcccaaagaatgataaggcaggaaatactgctcaaaacgcttctcttcgtaagcatcaagccaggtaaaatcgggctggttatcggcaaaaataccggtcatcagttcgatatacgggccgttattgtcggtcagactcttatcccacgcctggccaaattcactgtgtccccaactccactgttttttacctggcgcaatatggtggttggcaacgtgcagcaaaccgccatcttcatcgtgacaccacgcgccgacaaaatcgtactggcttttttcggccatataactggttggaacaggcacatttttatagcgagaaatgtccactccagcggagtagtccactttgtagtaagtgccggtagcgatggggaaagcggagacggcccgtttgccgtgatcaaacaccgccgttacatccggcgggaagacgctctgatgcccttccccccctttcactgccgggttggcccaccacaagaaatgacgcggcgtggcgttcccgttatagacgcggctggcgatttccagcgccgcccggtcagggcgcagggtgaaacctgtcatcacctgtaaaccatgcatcggctccgtttcgcctacccacaccgtctgtgcaccgtcttcatgggcttcgagggtgaaatcaacgggcataaaggtggtcgggcgatgatgttgcggccagttaaactcaatcccaccggaaatccacggccccagcagccccaccagcgcaggtttaatgacttcattgtgataaacaaaatcgcgctgtttcactttatcccacgcgcgatgcacccgaccgcccagttccggcaggatcatcactttgatgtagtcgttttccagccacaccgcctgccaggatttcagggttttctgctcgctcagcgtatcggtcacgccgtagggataaaccgcgccggagcttccctgataaacgcgattttccaggaacatgggatgtatatcctgcggcccggtttcataggtcgggatctcaacgcgctcttgccacacttttactggagtcatggtgccctcaatattaacaagacatactgaattaaaagatttgtggcagtgtattgaacaatctggcaatgttttcgcggaataatcacgcaattaactaaacaaggtttagtgaagatgagagcctgcattaataatcaacagattcgccaccataacaaatgcgtgattctggaactgctgtaccggcaaaagcgcgccaataaaagtacgctggcccggctggcgcaaattagcattccggcagtcagtaatattttgcaggaactggaaagcgaaaaacgggtggtgaatattgacgatgaaagccagacgcgcgggcatagtagcggtacatggctgattgcgccggaaggtgactggacgctgtgcctgaacgtgacgcccaccagtattgagtgtcaggttgctaatgcttgtttaagtccgaaaggtgaatttgagtatttacagattgatgcaccgacgccgcaggcgctgctgtccgaaatcgaaaaatgctggcatcgccaccgtaaattgtggccggaccataccatcaacctggcgttggcaatccacggtcaggttgatcctgtgaccggcgtgagccaaaccatgccgcaagcgccgtggacaacgccggtggaggtgaaatatctgctggaagagaagctcggcattcgggtgatggtcgataatgactgcgtgatgctggcgctggcggagaaatggcaaaataatagccaggaacgggatttctgcgtgatcaacgttgattacggcattggcagcagcttcgtgattaacgagcaaatttatcgcggcagtttgtatggtagcggacagattggtcacaccatcgttaatccggatggcgtcgtctgcgactgtggacgttatggctgcctggaaactgtcgccagcttaagcgcattaaaaaaacaggcgcgggtatggctaaaaagtcaaccggttagtactcaacttgatcctgaaaaactgactacagcgcagttaatcgctgcctggcaaagtggagaaccgtggatcaccagctgggttgatcgctctgccaatgccattggtttgagtctgtataacttcctcaacatcctcaatattaatcagatttggttgtacggtcgcagttgtgcctttggtgagaactggcttaatactattattcgccagacaggatttaacccgttcgaccgcgacgaaggaccgagcgtgaaagcgacgcaaattggctttgggcaattaagccgcgcacaacaggtgctgggaattggctatttgtatgttgaggcgcagttacgacagatttgatggcgcgataacgtagaaaggcttcccgaaggaagccttgatgatcataaacgaaaaattgcctgatgcgctacgcttatcaggcctacacggagattgcaatatattgaatttgcaaagttttgtaggccggataaggcgttcacgccgcatccggcatgaacaacgagcacattgacagcaaatcaccgtttcgcttatgcgtaaaccgggtaacgtgcgcagatgtcgagaactttacctttgatgcgctcgataacggcttcatcattgatgctgtccagcacgtcacacatccagccagccagttctttcgcttcggcttctttaaagccgcgacgggtaatcgccggagtacctacacgaataccggaggtcacaaacgggctcttcggatcgttcggtacgctgtttttgttgacggtgatgttagcacggcccagagcggcgtctgcttctttaccggtcaggtttttatcaaccagatcaaccaggaacaggtggttatcagtgccgccggaaaccactttgtagccgcgctcgaggaacacttctaccatcgctttagcgtttttagcgacctgctgctggtaagttttgaactcaggctccatcgcttctttcagagcaaccgctttaccggcgattacgtgcatcaacggaccgccctgaccaccagggaaaacggcagagttcagttttttgtacagctcttcgctaccacctttcgccaggatcaggccgccgcgcggacccgccagggttttgtgagtggtggtagtaacaacgtgagcatgaggaaccgggttcgggtagacgccagcagcaaccaggcccgcaacgtgcgccatatcaacgaacaggtaagcaccgatgctgtcagcgatttcacgcattttcgcccagtccaccacgccggaatatgcagagaaaccaccgataatcattttcggcttgtgttctttggcttgtttttccagatcggcgtagtcgatatgaccggtagcatcgataccgtaaggaacgatgttgtacagtttaccggagaagttaaccggagaaccgtgagtcaggtgaccgccatgcgccaggttcatacccagaacggtatcacctggttccagcagcgcggtgtagaccgcaaagttagcctgggagccggagtgcggctggacgttagcgtagtcagcgccgaacagttctttcgcacgatcgatcgccagttgttcaacgatatcaacatactcgcaaccgccgtagtagcgtttgcccggataaccttcagcatatttgttggtcagctgagaaccctgcgcctgcattacgcgcgggctggtgtagttttcggaggcgatcagttcgatgtgctcttcctgacgtactttttcctgctccatagcctgccacagttcggcatcataatcggcaatgttcatttcacgctttaacatccgcatctcctgactcagctaacaataaaatttttggcctttataggcggtcctgttggacaacggcgaacagtataaccgaatcattgtgcgataacaggtcttgacaaaggaatttacgcaaacgattaccttcaggctacgcaaggctttggagaataaagagcttgcaaccggaaacggatttcttttcaggtttgtgatgcaaatttttcacttcatcacattctttctgaaaaacaccaaagaaccatttacattgcagggctattttttataagatgcatttgagatacatcaattaagatgcaaaaaaaggaagaccatatgcttgacgctcaaaccatcgctacagtaaaagccaccatccctttactggtggaaacggggccaaagttaaccgcccatttctacgaccgtatgtttactcataacccagaactcaaagaaatttttaacatgagtaaccagcgtaatggcgatcaacgtgaagccctgtttaacgctattgccgcctacgccagtaatattgaaaacctgcctgcgctgctgccagcggtagaaaaaatcgcgcagaagcacaccagcttccagatcaaaccggaacagtacaacatcgtcggtgaacacctgttggcaacgctggacgaaatgttcagcccggggcaggaagtgctggacgcgtggggtaaagcctatggtgtactggctaatgtatttatcaatcgcgaggcggaaatctataacgaaaacgccagcaaagccggtggttgggaaggtactcgcgatttccgcattgtggctaaaacaccgcgcagcgcgcttatcaccagcttcgaactggagccggtcgacggtggcgcagtggcagaataccgtccggggcaatatctcggcgtctggctgaagccggaaggtttcccacatcaggaaattcgtcagtactctttgactcgcaaaccggatggcaaaggctatcgtattgcggtgaaacgcgaagagggtgggcaggtatccaactggttgcacaatcacgccaatgttggcgatgtcgtgaaactggtcgctccggcaggtgatttctttatggctgtcgcagatgacacaccagtgacgttaatctctgccggtgttggtcaaacgccaatgctggcaatgctcgacacgctggcaaaagcaggccacacagcacaagtgaactggttccatgcggcagaaaatggcgatgttcacgcctttgccgatgaagttaaggaactggggcagagtctgccgcgctttaccgcgcacacctggtatcgtcagccgagcgaagccgatcgcgctaaaggtcagtttgatagcgaaggtctgatggatttgagcaaactggaaggtgcgttcagcgatccgacaatgcagttctatctctgcggcccggttggcttcatgcagtttaccgcgaaacagttagtggatctgggcgtgaagcaggaaaacattcattacgaatgctttggcccgcataaggtgctgtaatttgatgttgccggatggaaacatccggcaacccttgacgcggtttaaattgccgcgtcgtcctcttcaccggtacggatgcgaatgacccgtgccacgtcaaagacgaagattttaccgtcaccgattttgccggtttgcgccgtgcgaataatggtatcgacacaggtatcgacaatgtcgtccggtacgacaatctcaattttcactttcggcagaaaatccaccatatactccgcgccgcggtacagctcggtatggcctttctggcgaccaaagcctttcacttcggtcaccgtcatgccggtaataccgacttcggccagtgcttcgcggacatcgtccagcttgaagggttttataatcgcatcaatctttttcatgctattccttgaaaaggtcgcctgtcttttgatctgctaaacgtaacacataacgccaattcattccttgaaatcgtttgcatccagctcgtgtcgggaaagcagtttataaaattctgtccggttgcgccccgccattctcgccgcgtgggtgacgttgcctttggtgatttgcagcagcttacgcaaatagttgagttcaaactgattacgtgcctcaacaaaggttggcagcgccgtattttcaccctccagcgcctgctccaccagcgcatcactaatcaccggagaactggtcagcgccacgcactgttcaatcacgttgaccaactggcgcacattacccggccagctcgcggtcatcaggcgtttcatcgcatcggtagagaacgcgcggacaaacggtttatgtcgctctgccgcctggcgcaacaggtgatttgccagtagcggaatgtcttctgtgcgctccgccagtgccggaattttcaggctgacaacgttgaggcggtaatagagatcttcgcggaattccccgcgcgccatcgcttttggcagatcacggtgagtggcagaaataatccgcacattgatatcaatatcgcggttactgcccagcgggcgcactttacgctcctgcaacacgcgcagcagtttgacctgtaacggcgcaggcatatcgccaatttcatcgagaaatagcgttccgccttccgccgcctggaataaaccttcgcgattgctgacagcgccagtaaacgcgccacgcgcatgaccaaacagctcgctctccagcaattgctcgggcaatgcgccacagttaatagcaataaatggtttgctgttgcgcgggctggcgttgtggatagcctgggcgaaaatctctttcccggtgccgctctgaccgttaatcaaaacgctgacgtcactttgcgccaccagccgcgcctgttccagcaaacgcagcatcagcgggctgcgggtgacaattgcctcgcgccagcgttcatcggtggctggcgcggattgctccagcgcatcgtcaattgcctgatatagcgcgtctttgtcgacaggcttggtgaggaaactaaaaacgccctgctgtgttgcagcaacggcatcgggaatagaaccatgcgcggtaagaataattaccggcattcccggctgcactttctggatttcagcaaacagctgcataccgtccatttcatccatccgcaggtcgctgatgactaaatctactttttcgcgattcagtacccgtaatccttcagcgccactttccgccgtgaccacactgtagccttcgctggtcaggcgcaggccaagcagtttcagcaatcccggatcgtcatcgaccaataataaatgcgcaggtttatggctcatcaggagtgacctcatgggtggatggcgcgggcttttcactctcgtgcggcgtatccgggctgaaatttccagccggtttgcgggtgctgagctggcgttcaatatcggtcaggttttccagcttgcgggtggtgagttccagttgctgctgtagaacgtgatgttgctggcgcaatgtatccagctcgctgtcgctggactgctggagtttactgtaacgttggcgctcttccgccagttgcagttgcagcgcctgaccatcgcgccagagttgatacagtgggcgaacctgtgccgggatctcggtacttaacgcttcaatacgcgcgaccagctggcggcgctcatacggcgtaattttggcgtcggcgagcaaaatcccttgtttaaaggtattttgccagctgccgtcgtcatattggcgagcttgctgacggctctgcgcaggcattaaacgatcagcacaatccatcgcccgcagccagtaaagcggattggtttcggtacttttaccttgcagcgcccagatgtcgctacattcagtagaaagatagtcagccagttgataaaccggaattttttcttctgctggcgtatcaatggctggcttattgtgattctgcacgcaacccagcaatgccagacatggcagccctgccagccacagccgtcggggcaataatcgttgaaaaatgtgtcgcatattcaccagacttaaagcctatcccagtgggcgtaattgttgcagacagtctggacatggacagcgcggagaaaccggagcgtacatatcgtacgtgaagatttcgagcactgcccggggccgaactgacaaataaaatagcctgataggataggctgttagcattatttcgtgtttttgctgctcggtaattcaatgcggaaacaaacgtcttgcccgctctcgtcgaccagatacagttccccttgcatacggcgaatacaatccctggcaatgcttaatcccagaccgctgcccttcaccgccccttttcgctggtggcttccctgaaaaaagggttcgaagatcatggcgcgttcctcttgcggaatgggcgtgcctgtattgatgacatcaatataaacccgcgcaccatgtaaactgctgcgaaggcaaatgttaccggattcagccccgtagtgcaccgcattggagtaaagattatccagtacgctcatcagcagcattggctccgccaggcaagctgttgctttgagatcgacgtcggtatgcatcattttagcccgtgcgggcaggctatgagcagaaaccactgtctccaccagcggtgctaactcaacattctccagttccaccgcactgtccgcctgtttacggttgtaatcaagcagttgttcgatcagtttttgcaaattgcggctgctgctatcaagaatgctcaccacctctttttgctctggcgtaagcggcccgacaacctggtcagccagtaattcagtgccctcgcgcatactcgccagtggcgtttttaattcatgagataaatgtcttaaaaattgatggcgttgggattccagccaactcaggcgctcacttaaccaaagaatacgttgcccaacgctgcgtaactcgctcggtccactgaagctgacgctattgcccagagaacgcccttcccccagacggttgatcatgcgctcgatatttttcaccggcccgataatcatccgcgtgaaaagcagtaccattaccagactcaccagaaatagcaccaggctttgccaaccaaaatattgcccacgttcggcgatttcacgctgaagctgctgcccacgagagaacaccactgtgcgcgtggcctgtaccatttcggtattggcactggcaaaggcttcaagacgtgcggcggcggcagcatcgggaccgctgttgttacactgaagttgagccagattgtgcaaatcctgacgtaatgcctggtagagtttatcgtccggcagcacgcctgcgtgggcatcgagcatttcgctgtaacgcttgcgctggctttgataaaccttcgccagggttgggtcgtccagcacgcaatactgacggtaactacgctccatctccagcgccgcgttggtcatcgcttcactgcgccgggcatcaataagcgtagtgcggttaaccagcgccgcctgatcgctaagcgcattcaggctttgccaggcttgccatgccagcaccaacaggggcagcagaatcagcaaaaatgccagcattaccagttgtcgtaaactgcggggaaaaacgggccagcgtttcaaggtgttactctcgtcagacgcgaatagcctgatgctaaccgaggggaagttcagatacaacaaagccgggaattacccggctttgttatggaataaggcggtgcctaactcgacgtttcgcccgatggttgatatagctacgctgatatcagaagttggacggcaggcaccttgttgtgcgtcattcgtattttatgtagcacgtcccgaaggggctgacataagtcggtgaatgagccactggttactattatgcagtaactgtgccaataaagaaaatagtttggtaacgtactgattatacgttgctttgaggggtttatgtctcctccgctgtttgaatgtaaatcagccactgtgtcgctaaaaagagacaacttaagataaacttattagataatattaaaatcaatgagttaagtgtcgccagaaagcgacacggcaaaccacccattgtcgtgatttacagacacaaaaaagctcccggagttgggagcttatgatagtggttggtgcttaatgccgcatccgggctgcaaaaccaatgggctgacgacttaccccaactgcttacgcgcattgcggaaaatgcgcatccatgggccatcctcgccccagttttccggatgccaggagttgctgacagtacggaaaacacgttccgggtgcggcatcataatggtgactcgaccactttcagtcgtgactgccgtaataccgttcggactaccgttcgggttagccgggtaggtttcagtgactttgccgaagttatcgacatagcgcagtgccaccagccctttgctttccagtgccgccagatgcgccgcatcacgcacttccacgcgcccttcaccatgagagacagcaatcggcatttggctgcccaccatcccctgcaacagcagagacgggctttgggttacttcaaccaggctgaaacgcgcttcaaagcgatcggaggtattgcgcacaaaacgtggccacaactcactacctgggatcagttcacgcagattagacatcatctggcaaccgttacatacccccagcgccagcgtttgcggacggtggaagaaggttgcaaactcatcgcgtacacggtcattgaacaggatactcttcgcccaaccttcaccggcacccagcacatcaccgtaggagaaaccaccgcacgcgaccagggcgtggaaatcttccaggcccgtgcgtccggtcagcaggtcactcatatgcacgtcgatagcatcaaagcctgcacggtggaaagctgccgccatttcaacatggctgttcacgccctgctcacgcagtacggcaactttcggacgtgcgccagtggcaatatacggtgctgccacatcttcgttgatatcgaagctcagttttacattcaggcccggatcggcgtcgttagatttcgcctgatgctcctgatcggcacactccgggttgtcacgcaggcgctgcatctgccaggtagtttctgcccaccagacacgcaacgtggtgcggctttcgctgaatacagtctgcccgttggcggtaatcacaaaacggtcaccggaaaccgcctgccctacataatggacacaatcagcaagcccatgctgtgccagtacggactcgaccgcttcacggtcagcggcacgaacctgaatcaccgcacccagttcttcgttaaacaacgccgccaggcgatcgtcacccagagtggcgatatccgcgtcaatgccacaatgaccagcaaaggccatttccgccagcgttaccagcaggccgccatcagagcggtcgtgatacgccagcagcttacgctgtgcaaccagcgcctgaatcgcgtcatagaagcctttcagttgcgcgacatcgcgtacatctgccggtttgtcgccaagctgacgataaacctgcgccagcgccgttgcgcccagcgcgttattgcctttgcccaaatcaatcagcagcagtgcgttatcttcggtagaaagctgcggcgtgatggtgtgacgtacatcttccacgcgggcaaatgcagaaatcaccaggctcagcgggctcgtcatttcgcgctcttcgttaccttcctgccagcgggttttcatgctcatggagtctttacccaccgggatcgtcaggcccagcgccggacaaagctcttcgcccacggctttaacggcttcatacaggcccgcatcttcaccagggtggcctgccgccgccatccagttggcggaaagtttgatgcgtttgatatcgccaatttgtgttgcggcgatgttggttaacgcttcaccgaccgccagacgggcagaggcggcgaaatccagcagcgcaaccggcgcacgctcgccaatcgccatcgcttcaccgtagtagctgtcgaggctggcggtagtgaccgcgcagttagcgaccggcacctgccacggccccaccatctgatcgcgcgctaccatgccggttacgctgcggtcgccaatggtcaccaggaaggttttttccgccacagtcggcagatgcagcacacgtttcaccgcgtctgcaatggtgatcccttcacgggccagcgcgtcgcctttcgctttcagcgtttgtacatcgcgggtcatcttcggcgttttaccaagcaggacgtccagcggcagatcgatcggctgattatcaaaatgacgatcgtgcagagaaagatgcagttcttcggtcgcttcaccaatcaccgcgtagggtgcgcgctcacgcttacacagttcgtcaaacagcggtaattgatcggcagcaaccgccagcacgtagcgttcctgggattcgttacaccagatttccagcgggctcatgcccggttcgtcgcttagaatctcgcgcagttcaaatttaccgccgcgcccgccgtcgctcaccagttccggcatggcgttagaaagaccgccagcgccaacgtcgtggataaacaggattgggttggcatcaccaagctgccagcaacggtcgatcacttcctggcagcgacgctccatctccgggttgtcgcgctgtacggaagcaaagtcgaggtcggcatcagactgaccagacgccatagaagacgctgcaccaccgccaagaccgatgttcattgccgggccgccgagaacgaccagcttcgcaccgacgttgatctcgcctttttgtacgtgatcggcgcgaatgttgccgatcccgcccgccagcatgatcggtttgtgataaccgcgcagctcttcgccgttgtggctgttcactttttcttcataagtacggaagtagccgttcagtgccggacgaccaaattcgttgttaaacgccgcgccgcccagcgggccttcggtcatgatgtccagcgcggtgacaatgcgctcaggcttaccgaaatcttcttcccacggctgttcgaagccaggaattcgcaggttggaaacggagaaaccaaccagacccgctttcggctttgcgccgcgcccggtggcaccttcatcgcggatttcaccgccggaaccggtcgccgcgcccggccacggagaaatcgccgtcgggtggttgtgagtttcgactttcatcagaatatgcgccggttcctgatggaaatcgtagcggcccgtttcgtggtcagcaaagtagcggcccacttcagaaccttccattacggcggcgttatctttataagcagagagaacgtgatctggcgtggtttcgaaagtatttttgatcatcttgaacaggcttttcggctgctgttcaccatcgataacccagtcggcgttaaaaattttgtggcggcagtgctcggagttcgcctgggcaaacatatacagttcgatgtcgttcgggttacgaccaagctttgtgaaagcatcctgcagatagtcaatttcatcttccgccagagccaagccaagacgcaggttagcgtcgatcagcgcctgacggccctgccccagcaaatcaacgctggtaaccggagtcggttgatggtgggcaaacaactgctctgcatcatctaaagcaaaaaagaccgtttccatcatgcggtcgtgcagttcagcggtaacctgctgccattgttcattggtcagcgtaccggcttctatatagtaagcaacgccgcgctcaaggcggtttacctgttgtagcccgcagttatgggcaatatcggtcgctttgctagaccagggagagatggtgccaggacgcggggtcaccagcaggagtttgccttgcggggcgtggctggcgagtgccgggccatatttcagcaggcgttcaagttgtgcgtgctcatcatcgtttaacggcgcattgaggtcagcaaaatggacatactcggcgtaaatattgtgaaccgggagcctggcagcctgaaaacgtgccagcagtttgttgattcggaatgcgctcagtgcagggctaccacgcagaatttccatcataagtctctcgtcttctaagctttcggtgtacccaagggggggaaacgggcgtcattataaagaatctgatgcgctgacgaaaccgtttgcgtggaaataaaatcaccatcgtgaattagcaacgcgtgccgccaatggctgtaataagttgccatctggcgcaggtttacgcaaaatgccgctcatttatgagtaaacctttcactattattacgttttttcaagctgggacgcgcacgacacagagaattaactaattgaaaaaattaaagattaattatctgttcatcggcattctggcactgctgctcgcggtcgctctctggccatccattccctggtttggtaaagccgacaaccgtatcgccgccattcaagcgcggggagagttgcgtgtgagcaccattcatactcccctgacttataacgaaatcaacgggaaaccttttggcctggattacgaactggcgaaacagtttgccgattacctcggcgtaaaactgaaagtgaccgtgcggcagaatatcagccagctgtttgacgaccttgataatggtaacgccgacctgctggcggcaggacttgtctataacagtgagcgggtaaaaaattatcagcctggccctacctattattccgtgagtcaacaactggtttataaagtgggtcagtatcgcccacgtacgctgggcaacctgacggcggagcaactcaccgttgcaccgggtcatgtggtggttaacgatctccagaccctgaaagaaacaaaattcccggaattaagctggaaggtagacgacaaaaaaggctctgcggaattaatggaagatgtcatcgaaggaaaactcgattacaccattgctgattctgtcgccatcagcctgtttcagcgcgttcacccggagctcgccgtagcgctcgatatcaccgatgaacaaccggtgacttggtttagcccgttagatggcgataataccctttccgccgccctgctcgacttcttcaacgaaatgaatgaagacggtacgctggcacgcattgaagagaaatacctggggcatggcgatgattttgattacgtcgatacgcgcacatttttacgcgccgtcgatgcggtactgccgcagttaaagcccctgtttgagaaatacgccgaagaaattgactggcgtttgctggccgctattgcttatcaggaaagccactgggatgcacaggccactagtccgacgggtgtgcgcggcatgatgatgttaaccaaaaataccgcgcaaagcctcggcattacggatcgtaccgatgccgaacagagcatcagcggtggcgtgcgttatttgcaggatatgatgagtaaagtgccggaaagtgtgccggagaacgagcggatctggtttgccctcgctgcgtacaatatgggctatgcgcatatgctggatgcccgcgccctgacggcaaaaaccaaagggaatcctgacagttgggctgacgcaaaacagcgtctgcctttacttagccagaaaccctattacagcaagctgacttacggctacgctcgtggacatgaagcctacgcttatgtcgaaaatattcgtaagtatcagattagcctggtgggttatctgcaagagaaagagaagcaggctacagaagcggcgatgcaactggcgcaggattatccggcggtaagccctacggagttgggcaaagagaaatttccttttctcagctttctttcccagagcagtagtaactatttgacccattctccctctctgctgttttccaggaaagggagtgaagagaaacaaaattaatccgtgctggattgcgcttttttctgcgctttaatttcctggcggcgcatgcgaaagaagtcactgagcaacgccgcgcactcatccgccagtattccttccgtaatttccactcggtgattcatacccggatgatgcagcacatccattaaagatcccgcagcgccagttttcgcgtcacgcgcaccaaagaccacgcgaccaatgcgactgtggatcatcgctccggcacacattacacatggttcaagcgtgacatacaacgtggcgtcgatcagacgataattttgcatcaccagaccaccctgccgcagggccatgatttctgcatgtgcggtgggatcatggcgaccaatcgggcggttccagccttcgccgattacccgattgttatgcactaataccgcgccgaccggcacttcccgctcatcccaggcacgtttcgccagcgtcagcgcgtgacgcatccagtattcgtggctaaattcgacttcagacaaaaagaaaactccggttataaaagcgcggcgcattatacacggacgctatgctttactttattccagttgctggagttcaccgcgcggggttactcgccaacgatgctgacagaaataaagcagcggattgtcctgattactgtcgctatagccactgtacagccgcagcggagtgccgattttgcgctccagttgtgcgaccttttcatgtcccagacaacgcatcgtcaatacccaaccaccatagccacgctgaatttggctggcgataagattaacccgcggcagccagggcgtatcgaaataaaccgcttcaaccagcggctgcggagagccggtaatcaaccagatatcagcatcggaacttaacaggtaggtggttaatcgctcctgaaccagcggaaaggcggtaacattgtcgcgaaaccagcgcacgaaatcggcctgcaacgtctgtaaacgtgcttcgctgtgaccaaaagtgcacccccacagaagcagactcatcggccagcgtgccgcacgaccttttatcaataacgcaatggctataatcggtaacaacggcaggacaagtaacgcattcagcggttggcgacgtagtaaatagcgcagaaaactgccgaacatatcctgctgatgcaatgttccatctaagtcaaaaaacaccacacgacgctcgtgagttgccaaaccatattcctctggactgaaacatcctgattaattttcgctactacatagcctaacagatagatcatcacttttccggcaacaatcgaccgcatcatggctaactggaatttttaattcatggcaattagcggcaatggaatataaaattcactcgcgtgtgtctcatattgcctgttgtcgccactatttcatcgcgaggaaagatatgaacggcttacttcgtatccgtcagcgttaccaggggcttgcccagagtgataaaaaactggcggattatctgctgctacaacctgatacggcgcgccatttaagctctcagcaactggccaacgaagccggagtcagtcagtccagcgtcgtgaagttcgcgcaaaaactcggctataaaggttttccggcgcttaagttggcgttgagtgaagcgctggcaagccagccggaaagtccctccgtgcccattcataaccaaatccgcggtgatgatccgttacggctggtcggcgaaaaactaattaaagaaaatactgccgctatgtacgcaacgctaaacgttaatagtgaagagaaactgcatgaatgcgtaacaatgttgcgctctgcgcggcggataattctgaccggtattggcgctagcggtctggtggcgcaaaactttgcctggaagctgatgaagattggcttcaatgctgccgcagtgcgcgatatgcatgcgctactcgcaacagtacaggcgagctcccctgacgatctgttattagccatttcctacaccggtgtacgacgcgagttaaacctggcggcagatgagatgctgcgagtgggcggaaaagtgctggcgattaccggctttactccgaatgccctgcaacagcgtgcttctcattgcctgtataccattgccgaagaacaagcgacaaacagtgctagtatctctgcttgtcacgctcagggaatgttaacggatttgctgttcattgcgctgattcagcaggatctggaactggcaccagaacgtattcgtcatagtgaagcgctggtgaaaaaactggtctaagtaaagaatgcgcgtataatgcccgcccggtttgtgttgttttgagagtttccttatggcgttgttaatcactaaaaaatgcatcaattgtgatatgtgtgaacccgaatgcccgaatgaggcgattagtatgggagatcatatctacgagattaacagcgataagtgtaccgaatgcgtagggcactacgagacaccaacctgccagaaggtgtgcccgatccccaatactattgtgaaagatccggcgcatgtcgagacagaagaacagttgtgggataaatttgtgctgatgcaccacgcggataaaatttaatattctactctggaagtagagtattaattatattactgggaagccttaacgccattatatttatttaattgatgacattagcataatcattcactaagttaatttatatagtatctgcccagacacttatttatagttattaaaggtgcgtccgactggttcaccggacgcaccttaagtacgtttccttgtgttataagaacagaaggatcagctgtaaaacagcaatgatgattttgatgacccgtttaatcaggtatcggcaatcagtcattcgtttttccttaaacaaggaatgcagccattcagattagcccttacatctccccaaaactgaacgtgcgagttattgagggtgcatgctgcactccacaccagagctttgacgacaccactcgtttcaatgggggaattctgtggcatggtgtaaagcacagcaaaatcttcaataacgaagccaattttaatgtacttacgaattggcggtcacgttaatctttccatcaatattgctttcttcgtaaaggctcgagtttttatgctaaagattgcaagttgcttgtaaaagataagtacactgatccataatcgctgttgttgagggtgcatgctgcacaaaattaaagttaaaaagtaaaacccccgttccttaccagttcgggggttttactttttaaagagaacggtattatttttaactttcaataattaccgtggcacaagcatagtgccgctcatctgccagcgttacatgcatatttgcaacgcccagcttttccgccagttttaatgcctcgccccatagccgtagccgtggtttgccgagctcatcattgaatacttcaaattgattaaacgccagaccattgcggatcccggtgccaaacgcttttgctgcggcttctttcacagcaaaacgcttcgccagaaaacgcaccggctggtggtgcgttttccagatagcccattcgttatcgcttaatacgcggcgtgccaggcgatcaccggatcgggcgatcaccgcttcgatgcgagcgatctccacaatatccgtgcctaaacctaatattgccattagccacgcgcttccagcatcagacgcttcatttctgccaccgcatctttcagtccggtcatcactgcacgaccaataatggcatgaccgatattcagttcatgcatctcagggatggcggcaatggctttcacgttgtgataggtcagaccgtgtccggcgttaactttcagaccgaggcttgcggcaaaggtcgcggctttggcgatacgcgccagctcttgcgcctgttcggcgtcagttttggcatcagcatagcaaccggtgtggatctcgataaacggtgcgccaacctctgccgcagctttgatctgctcttcatcggcgtcaataaacagagaaacctgaatcccggcatctgccagacgtttgcaggcatcgcgcattttgtcacgctgccctgcgacatccaggccgccttcggttgttacttcctgacgcttttccggtaccaggcagcaaaaatgtggcttcgtctcaacggcgatcgccagcatctcttcggtcaccgccatctccagattcatgcgggtatccagcgtctgacgcaggatgcgcacgtcgcggtcagtaatgtgacggcgatcttcacgtaaatgcacggtaatgccgtccgctcccgcctgctcggcaataaacgcggcctgcaccggatccgggtaagcggtaccgcgcgcgttgcgcagcgtagcgatatggtcaatgttgacgcctaacagtaattcagccatgacaatcctcatcattcataatgtgttttcaccgttcgcttaggcataaactgccggaacagttccctgctctttaaaggtttaccgccaagatacggcttaagcgccatgcgggtaaagcgtttcgcggcgcgcagtgtgtctgcgtcaggaaattcccgtgcgtttaacgcttttaactgccttccggtgaacgttttattgtcgataacgacgcttgcgataaaccctttttcttcgcgataacgatacgtcatggtgtcatctaccggctcgccgctacccgcacaatgggtaaaattgacgccataacccagatgcccgagcagtgccagttcaaagcggcgcagcgcgggttctggcgtaccagtgacccctgcaagagactgaatgcagtgcaagtaatcgaaaaaaagttcagagaagcgcgtctcgtattccagtacgcgggagagaagttcgttgatgtacagaccgctgtaaagcgtgataccgcttaatggcagcgccaggctgacggcttcagcactgcgcagcgttttgacttcgccacgcccgccaaaacgtagcaagagaggggtgaaaggctgtaatgcacctttcagggtagagcgtttagagcgtgcgcctttggcaaccagacgcacgcgcccgctttcctccgtgaagacgtccagcatcaggctggtttcgctccacgggcgactatgcaggacaaatgcgcgctgccagccttccatcggagttactcttaaagatcgtcaacgtaaccgagactgcgcagtgcgcgttcgtcgtcggcccaaccggatttcacttttacccacagttcaaggtgaacaggcgcttcgaacatttcctgcatgtctttacgcgcttcaatcccgatggttttgatcttggcccctttgttgccaatgaccatcttcttctgcccttcacgctcaacgagaatcaaaccgttgatgtcataaccaccgcgttcgttagagacgaaacgttcgatctccacggtcacggagtacggcagttcagcgccgaggaaacgcatcagtttttcgcggatgatttcagacgccataaaacgctgactgcgatcggtgatgtaatcttccgggaagtgatgagtcgcttcaggtagatgcttacgcacgattgccgcaatagtgtcaacattcagcccggtttcggcagagattggcacgatatcgaggaagttcatctggcttgccaggaactgcaggtgcggcagcagatcggctttctcctgcacgttgtccactttgttcaccgcgaggattaccggcgctttgccttcgcgcagtttgttgagcaccatttcgtcgtccggcgtccagcgggtgccttcaacgacaaaaatcaccagctcaacatcgccaatagagctgctcgccgctttgttcatcaggcggttaatggcgcgtttttcttccatatgcaggcccggtgtatcgacgtagatcgcctgatacgcgccttcagtatggatccccacaatgcggtgacgagttgtctgcgccttgcgggaagtgatggagattttctgccccagcagtttgttcaacaatgtggatttgccaacgttcggacgtccgacgatggcaataaatccgcagtaacttttatcgatgctcattccagctccagttttttcaacgcctgttcggcggcagcctgctcagccttacgacggctactacctgtgccaaccaccggttcactcaggccgctgacctggcagtggatagtaaattcctgatcgtgcgcttcgccacgtacctggactaccagataagtcggcagcggcagatggcgaccctgcaaatattcttgcaagcgcgttttcggatctttttgtttatcgcctgggctaatttcgtccaaacgagtttgataccagttgaggattaatttctcgacggtttgaatatcactgtcgaggaatacgccaccaattaatgcttcgacggtgtcggcgagaatactctcacgacgaaatccaccgcttttaagttcacctggccctaaacgtaagcactcgcctaactcaaattcgcgcgccagttccgccagcgtattgccacggaccagcgtggcgcgcatccggctcatatcgccttcatccacacgagggaaacggtgataaagcgcattggcgataacgtagctcagaatagagtcgcctaaaaattctaaacgctcgttatgtttactgctggcactacgatgagttaatgcctgctgcaacagttcctgatgattaaaagtgtagcccagcttccgttgaagccgattaattacgatggggttcatgcgataccaataaataaatgcgtcaacaattcagcacacgaaacagacctgatatacatggttctgctaactgcttcgctgcagtttcagtttaccggtatatggggaccaacgctgtttcgtgtgccgtggcaacctggaggtgccaaccttaaacttcgggggaatattctatacacaacgacgggggatgtcgttagccacgggagatttatctcataaataattcacgttgtcgccataacggcgacaacgtgaacgaagatggctattaatggatgccgccaatgcgacttaagcgcagaccagtcggccattcgccttcttgcttatcgaagctcatccagatagccgttgcccgaccgaccagattcgcttccggcacaaagccccagtaacggctgtccgcgctgttgtcgcggttgtcgcccatcatgaagtattgtcccggaggaacaatccaggttgccagttgttgccctggctgctggtaatacatccccacctgatcctgcgcaatcggcactgtcagaatgcggtgcgtcacatcacccagtgtctctttacgctcggaaagacgaattccattttctttggtttcgtttttcggcacttcaaagaatccgctggtcgcttccccaccattacggcgactgaaggtctgaacgaaatcgctcggttccacgttactgtaggtgaccggcagcgcgttttcacacgcctggccggaactgcatcccggttgaatcgtcagctctttactgaccggatcgtaagtgactttatcgcccggtaaacccaccgcgcgcttgatgtaatcaagctttggatcttccggatatttaaagaccacgatatcgccgcgtttcggatgaccggtttcgatcagcgttttctggtagataggatctttaatgccataagcaaacttctctaccagaataaaatcaccaattaacagagtcggcatcatgctaccactcgggatctggaacggttcataaataaagctacgcacaatcaatacgatagccagtaccggaaaaacagaagcaccggtttccagccagccaggcttcggcgcaacctttttcaacgttgctttatccagactgtccccggcagccgcctgcgccgctgcctgacgttcccgccgtttaggtgcgaaaaagaatttatccacgcaccataaaatgcccgtcaccagtgtggcaatcaccagaatcagggcaaacatattcgccatgccaactcctaagggttatttgttgtctttgccgacgtgcagaatggcgaggaacgcttcctgcggcagctcgacgttaccgatctgcttcatgcgtttcttaccttctttctgcttctgcagcagctttttcttacggctgatatcgccgccataacatttagccagtacgtttttacgcagctgtttcacggtggatcgcgcaatgatgtgcgtaccaatcgctgcctgaatggcgatatcaaactgctggcgtgggatcagatctttcatcttctccaccaactcgcgaccgcggttttggctattatcacggtgggtgatcaacgccagcgcatcaacacgttcaccgttgattaatacgtctacacgtaccatgtcggacgcctggaagcgcttgaagttgtaatccagagacgcataaccacggctggtagatttcaggcgatcgaagaagtcgagcaccacttccgccatcgggatctcgtacgtcagcgccacctgattaccgtggtaaaccatattggtctgcacgccgcgtttttctacgcacaacgtaataacgttgccgagatatgcctgcggcagcagcatgtgacactctgcaatcggctcgcgcagttcgtagatgttatttaccgcaggcagcttggatgggctgtcgacgtagataacttctctactcgtggtttcaacttcatacactacggtcggcgcagtggtgatcagatccagatcgtattcacgttccagacgttcctggatgatctccatgtgcagcaggccgaggaagccgcagcggaaaccaaagcccagcgcgctggagctttccggctcatagaacagactggcatcgttcaggctgagtttacccagcgcgtcacggaaggcttcatagtcgtcggaacttaccgggaacagaccggcgtatacctgcggtttgactttcttaaagccaggcagcgccttttctgccggattacgcgccagcgttaaggtatcgccgactggagcgccgtggatatctttaatcgcacatacgagccagcctacttcgccacatttcagttcagtgcggtcaacctgtttcggcgtgaagatgcccagacggtcggcgttataggtctgcccggtactcatgactttcactttgtcgcccttacgcagggtgccgtttttaatacggataagactaacaacgcccaggtagttgtcgaaccaactgtcgataattagtgcctgcaacgggccttccggatcgccttccggcggcggaatgtcgcgcaccagacgttcgagaacgtcctgcacaccaacgccggttttcgcactacagcgcaccgcgtcggtggcgtcgatgccgacgatatcttcaatttcttccgccacgcgttcaggatcggctgccggcaggtcaatcttgttcagtaccggcacaacttcgagatccatttccatggcggtgtagcagtttgccagggtttgcgcttctacgccctgcccggcgtcgaccaccagcaatgcaccttcacaggcagccaggctacgggaaacttcataggagaagtctacgtggcccggggtgtcgataaagttaagctgataggtttcgccgtcagacgctttgtagtccagcgtcacgctttgcgctttgatggtaatgccacgctcacgctcaagatccatggaatcgagaacctgcgcctccatttcacggtcagacaggccaccgcagatctggataatacggtcagacagcgtgcttttaccgtggtcaatgtgagctatgatgctaaagttacgtatattcttcataaagtatgattattgtgccttaatgcccggttaaccaggcttttagaagtcgctgttctgagcttaacgtctgtattaatagaaacgccgcattctacactacaacattgaggcgaggaaatgttcataccgtatggattgtggtatctggaaacgtcctcgcatttgttatgcaaaatgcaacaaagccagtgaaatcactggctcgcgtcttcgctagatgtttcaaatcgcacaaggccaggcggcaatgccacgcttaagatgatcggttgccattctgcccgggcagcaaacttacggctgtagccgcgcgcaatcaggaacccgccaataccaccgaggatcgcaccacataatgctgcgacgtcagaagcaaagagtagctgaaataggctagcgataaggaataatcccaccagcgggctcatataaaccagtaatgcggagctaagcaggctgccttcggcgatccccaattccactttttgccccggcactaacggctcatcacagggtacgacaatggtatgcgtggtttgcgggccaagtttatttaacacgcggctaccgcaaccggcgcgactagcgcagctgctgcaactagctttaacatcacaactgaccagcgcctgcccgttttgccaggagacgacggtagcccactctttgatcattgcgctgccccgaacttaatattctcggcaatgcgtttcgccgtttgcggcggcagttcaccgacaatggtgatttcggcgttatcacgtacgcttgtactgacggttctgcgtccggtgcgcaacatctgatcggtgctgcttggcgtagcgcggttaacgtttacgctgaagctgaataatccgtcggaatagagacgactttcgataggcatgttgtccatcgtcggtagcggacgtcgactactggaaacttcgctaaaaccctgtggcaaccaggttggcgtccagctgaatttagctttttcacctacaggaacagaaagcaacggcggcaaatttgccttcgccagcgtctgcatactgctgctgatatcctgattgacgttaaaagcaatcacgcgaaattgttccagcgtttcaccatcgcgatcaaggagatcaacccgcatcggtaatttgctttcggtgtccatccacacgatgtagctgtagcgtgtaccatctcgggcaaccacgcgaatgacttcgcaaagacgatcagcaatacgcgtgcgcccgacggagataaagtcgtagtaaggagaaaggcgtttgaaatcggtatagataaggcttggcagagaatcaacaatgtaatcgccattaagcgtgaacggttcaagtcccggttcaaaatagctgatttcattgccgcgctgtaccacttcccggcgcgggccatccatttgcaacaattgtgcaagaggacggttatcgaggcgtgcatgtcgataacgcagagactcaacaccctgtttattgatgctgatgaaactcagctcgtaattcagactctgactggccaggttcatctgctgtaataacgccccggacgcgggagtggcgctggcgttagcagagaataacaggctacctgtcactaaactcatggcaaaccaaagttgcttcattactggctttgcgttcctaaagtttgaattcctggcacctgtacagcggcttgctgggtttgcgcctgctcaaactgaagctgttcagagtggagtcggcgttgcagttcgtaatcctgcaacattgcattaatgcgacgacgctgctcctgtacctgctgctgttgaccattgtttgcggtcgcttcagaaggtactcccaggcttaccgggctggctttacccatcatcggcagtgtattaaataccggcgtttcgggctgctgggacgtttcagattgtccattatagtgctggacgccaacgataactgcaaggcttacgcatgcggctacgcccatttgggtaagctgtgccgcccacggacgtactttctgccagaatggcattttctgccattgatgcggcgcaggctgggcttccgggatcaatgtcgccggttgacgtactggctcttcttcaatggcggccatcacgcgactagagatatcgaaatggagcacctcgggagtatcaccccgcatactgtcacggattaagtgatagctttcccaggttttctgcatttctgggttatgagccagttcgttaagcagctcactatccagcgtttcgccatccattaaagcggaaagttgttctttctgcatgcctaatacccttatccagtatcccgctatcgtcaacgcctgataagcggttgaactttgttatcaatagcttccctcgctcggaagatacgactacgcaccgtacctaccggacaatccatgatagcggctatctcttcatagctcaggccatccagctcccgcaaggttattgccatgcgtaaatcttccgggagggactcaatagttcggaaaactatctgtctcagttcttcactcaacattaagttctcagggttgctaatttctttcaacgcgccgccactttcgaagttttcagcttcaatggcatccacatcactggaaggtggacgacgcccctgagcaaccaggtaatttttcgctgtatttacagcaatccgatacagccatgtataaaaagcgctatctccccggaagctatccagcgcacgataggctttaataaaagcttcttgtaccacatcgggaacatcaccgctcggcacatagcgggaaaccagactcgccactttatgctgatagcgcactaccagtaagttaaaggctttctgatctcccttctggacccgttcaaccaggacctggtccgttaactgctcgctcatccgaggtaaagtctccccaaaccaaatttccacgcgctatcgaaacgccactccattagctgcaatttgagcaagcaaagggttagagtgtctcgtttttgtaaagttccgtaacgcatctgtttttgtttgtcatgctgtagacggatcattatctatcattataagtctacagaatctgaacatcgcattatctgtgtagaaatgcccatttaactgcctgaagagtaacccaacggcctttttatttcaccacctaatcctccaccagccagtaacttctctttttctcgccgccctgcgtcagcgtgtttagcaactgtaacaaatattaaaatagcaggtgtttatccgcacaacatgatgctatgctgaccaaaccatgtttagtaaattaaacaaagaaaatgaatactctccctgaacatagttgtgacgtgttgattatcggtagcggcgcagccggacttagtctggcgctacgcctggctgaccagcatcaggtcatcgttctaagtaaaggcccggtaacggaaggtagtacattttatgcccagggcggtattgccgccgtgtttgatgaaactgacagcattgacagccatgtggaagacacattgattgccggggctggtatttgcgatcgccatgcagttgaatttgtcgccagcaatgcacgatcctgtgtgcaatggctaatcgaccagggggtgttgtttgatacccacattcaaccgaatggcgaagaaagttaccatctgacccgtgaaggtggacatagtcaccgtcgtattcttcatgccgccgacgccaccggtagagaagtagaaaccacgctggtgagcaaggcgctgaaccatccgaatattcgcgtgctggagcgcagcaacgcggttgatctgattgtttctgacaaaattggcctgccgggcacgcgacgggttgttggcgcgtgggtatggaaccgtaataaagaaacggtggaaacctgccacgcaaaagcggtggtgctggcaaccggcggtgcgagcaaggtttatcagtacaccaccaatccggatatttcttctggcgatggcattgctatggcgtggcgcgcaggctgccgggttgccaatctcgaatttaatcagttccaccctaccgcgctatatcacccacaggcacgcaatttcctgttaacagaagcactgcgcggcgaaggcgcttatctcaagcgcccggatggtacgcgttttatgcccgattttgatgagcgcggcgaactggccccgcgcgatattgtcgcccgcgccattgaccatgaaatgaaacgcctcggcgcagattgtatgttccttgatatcagccataagcccgccgattttattcgccagcatttcccgatgatttatgaaaagctgctcgggctggggattgatctcacacaagaaccggtaccgattgtgcctgctgcacattatacctgcggtggtgtaatggttgatgatcatgggcgtacggacgtcgagggcttgtatgccattggcgaggtgagttataccggcttacacggcgctaaccgcatggccagcaatagtttgctggagtgtctggtctatggctggagcgcggcggaagatatcaccagacgtatgccttatgcccacgacatcagtacgttaccgccgtgggatgaaagccgcgttgagaaccctgacgaacgggtagtaattcagcataactggcacgagctacgtctgtttatgtgggattacgttggcattgtgcgcacaacgaagcgcctggaacgcgccctgcggcggataaccatgctccaacaagaaatagacgaatattacgcccatttccgcgtcagtaataatttgctggagctgcgtaatctggtacaggttgccgagttgattgttcgctgtgcaatgatgcgtaaagagagtcgggggttgcatttcacgctggattatccggaactgctcacccattccggtccgagcatcctttcccccggcaatcattacataaacagataaaaagcctgggtcagcgccgtatacgcttcggaatagttctggtctggcccacgaatgactaagcgatcgctaaagcattctcccgcctgcggggagaatgccagcagcacccgatgcggcagtcgcgcttcgttttccgccacatccgtccgcaaacgtaaatgccagcccatgcttaatgccagctccgtaaaaccattaccaatctgctctggcagcactacgcagaaaaatccctcttcggtaatgcactccgccgcacaggtcagcaagcttgggtgatcaagcgtagtggtatagcgagcctgttcccgttgaggtgtgctgcactctactccctgctgatagtaaggtgggttactgatgattaaatcgaagcgtactgtctgctgtgtaatccactgctgaatatccgccgtatggacgttaatccgctctgcccacggggactggttgatattttcctgcgcctgcgcggcagcttcactttccagttcaactgcatcaatcatcacgctgtcatcggttcgctgcgccagcattaatgccagcaacccgctacccgcgccgatatcaaggcaacgttttaccccagccaccggtgcccatgcgcccaataaaataccatccgttcccactttcatcgcacagcgatcgtgagcaacaaaaaactgtttaaaagtaaatccattacgacgaagcacggatgtagactgactcatgaaaataaaaccttgcaggaaaaacggcgatagcaccgggtgagaacaatacccgagaagcgatatccatacaaacagatgaagattgcagccgtaacgtctataatcagcgccccacacagaggtagaacatgactgtaacgactttttccgaacttgaactcgacgaaagcctgctggaagccctccaggataaaggtttcactcgcccgaccgccattcaggctgccgccattccgcctgcgctcgatggccgtgatgtactcggttctgcgccgacaggcaccggtaaaacggcggcgtatctgctgccagcgttgcagcacctgctcgatttcccgcgtaagaaatccggtccgccgcgtattttgatcctcaccccaactcgcgagctggcgatgcaggtgtccgatcatgcccgcgaactggcgaaacatacgcatctggatatcgccaccatcaccggcggcgtagcctatatgaaccacgcggaagtgttcagcgaaaatcaggacatcgtggtcgccacgaccggacgtctgctgcaatacataaaagaagagaacttcgattgccgcgcggttgaaacgctgatcctcgacgaagcagaccgtatgctggatatgggcttcgctcaggatatcgaacatattgctggcgaaacgcgctggcgtaaacagaccctgctctttagcgcaacgctggaaggcgatgcgattcaggactttgccgagcgtctgctggaagatccggtggaagtttctgccaatccctccacccgtgagcgcaaaaaaattcatcagtggtattaccgcgccgatgatcttgagcataaaaccgcgttgctggtgcatctgttaaaacagccggaagcgacccgcagtattgtgtttgtgcgtaagcgtgagcgtgtgcatgagctggcaaactggctgcgcgaagcgggcatcaacaactgctatctcgaaggtgagatggtacagggcaagcgtaacgaagcgatcaagcgtttgaccgaaggtcgcgtaaacgtactggtcgcaaccgatgttgccgcgcgcggtatcgacattcctgacgtcagccacgtctttaacttcgatatgccgcgcagtggcgatacttatttgcaccgtatcggacgtaccgcgcgcgccggtcgtaaaggcaccgcaattagcctggtggaagcccatgaccatctgctgctgggtaaagtaggccgctatattgaagagccaattaaagctcgcgttattgatgagttacgcccgaaaacgcgtgcgccaagcgaaaagcagaccggcaagccaagcaagaaagtactggctaaacgtgctgagaagaaaaaagctaaagagaaagagaagccgcgggtgaaaaaacgccatcgcgacaccaaaaatattggtaagcgccgtaaaccaagcggaacgggcgtgccaccgcaaacgacagaagagtaatctcaatgccaggtttaagcctggtattaaaagtgctggcaaacgcaaaactgcctgatgcgctacgcttatcaggcctacgtggctcatgcaatatattgaatttgcacgatcttgtaggccggataaggcgttcacgccgcatccggcatgaataaagcgcactttgtcgacaagttaaatgccgggtttaatcccgacattatttttatccagccacaaaactctcttcaacacactgaataaaagtgtgcatcgccgggctaaccgcttttccagcatgatgtgcgcacatggccgtaatggtctggctctgttcgccaaaaggcaattcaattaattctccgcactccaactcttttgccaccgcaaagcgcggtaggtagctgaccccgatattcgccgcgacacaacgcttgatgctttcgatacttataagctcaatggtgttttccaccgtgatccgccgctgacgcagcgtgctctcaaatatctgccggaagacacattgcggttcgttgataataaagctacaggcgttatgtcttcccggctcagtaaaatcgacatctgcaatttgcggactagccaccagcaccagactttgttcacccaactctcgtcgattcagagcatcatcattccctacacgataaaagacgccaacatcggcctcatcattcagtagcgcatcacggatcacgtaacagttcaggctctgcaagcttaaacgcacttttggggcgcgttgccgaaaacgctgcaacacctgcggcattcggtaagagagcaacgtttcgccgctaacaacgcgtagttccccgtccggatcactctcctttttggcagcctcacgaagcgtatccatcactcgggtaagttcataaatgtgcggcagcaacttttttccttcgcgggtaaggcacatccgtcggccaattttctcaaataactggacactaaactcctgctcaagctgctgaatatgaaaagtcaccgtgctttgtgtacagcacaatttttggctagctcgcaaaaaggaaccctcttccaccacggttttaagcgtaataaaacggcgcagatccataaccccaaacctatcgaaaatatcgaatctagaatataaaaacattcatttttttaaatgttccgtgtcgggtactgtctaccaaaacagaggagataacaagtgacaccgacccttttaagtgctttttggacttacaccctgattaccgctatgacgccaggaccgaacaatattctcgcccttagctctgctacgagccatggatttcgtcaaagtacccgcgtgctggcagggatgagtctgggatttttgattgtgatgttactgtgtgcgggcattagttttagtctggcagtgattgacccggcagcggtacaccttttgagttgggcgggggcggcatatattgtctggctggcgtggaaaatcgccaccagcccaacaaaggaagacggacttcaggcaaaaccaatcagcttttgggccagctttgctttgcagtttgtgaacgtcaaatcattttgtacggtgttacggcactgagcacgtttgttctgccgcaaacacaggcgttaagctgggtagttggcgtcagcgttttgctggcgatgattgggacgtttggcaatgtgtgctgggcgctggcggggcatctgtttcagcgattgtttcgccagtatggtcgccagttaaatatcgtgcttgccctgttgctggtctattgcgcggtacgcattttctattaacgaaaaaaagcggaagaggtcgccctcttccgcttagtaacttgctacttaagccttacaggctttcagtaaaggtacgagcgataacgtcgcgctgctgttccggagtcagagagttaaagcgaactgcataaccggatacacggatggtcagctgcggatatttttccggatgcttaactgcatcttccagagtttcgcgacgcagaacgttaacgttcaggtgttgaccaccttcaacgcgaacttctggtttcacttctactggaacttcacggtattcaatgtcacccagtttgcttactgcaaccacttcatcttctgcataacctgcttttgcaacgatgcaacgcgcttcgcctttttcgctgtccagcagccagaaagagttcagcagatcgtcgttagcggctttagtaatctggatacctgtaatcatgtgatgcctccccggcaaaattatttgatttgttcagcctgtcgcggccaattggtaaaaccattgttgcttgagtgtatatatactcctcaaacacccttgaatctttgatttaaatcaataaaaaccacacatcaagtatggtcgcaaatggattttattgttttacatcaacttatgcgggtgtgaaattttaccaatttacatttttttgcactcgtttaagtctaaaaaatgagcatgattttgttctgtagaaagaagcagttaagctaggcggattgaagattcgcaggagagcgagatggctaacgaattaacctggcatgacgtgctggctgaagagaagcagcaaccctattttcttaatacccttcagaccgtcgccagcgagcggcagtccggcgtcactatctacccaccacaaaaagatgtctttaacgcgttccgctttacagagttgggtgacgttaaagtggtgattctcggccaggatccttatcacggaccgggacaggcgcatggtctggcattttccgttcgtcccggcattgccattcctccgagtttattgaatatgtataaagagctggaaaatactattccgggcttcacccgccctaatcatggttatcttgaaagctgggcgcgtcagggcgttctgctactcaatactgtgttgacggtacgcgcaggtcaggcgcattcccacgccagcctcggctgggaaaccttcaccgataaagtgatcagcctgattaaccagcatcgcgaaggcgtggtgtttttgttgtggggaagccatgcgcaaaagaaaggggcgattatagataagcaacgccatcatgtactgaaagcaccgcatccgagcccgcttagcgcgcatcgtggattctttggctgcaaccattttgtgctggcaaatcagtggctggaacaacgtggcgagacgccgattgactggatgccagtattaccggcagagagtgagtaaatttgcggggaaatgccggatggcagagttgccacccggctgatttatcaggctttattctgacgccaccattcaccaagcaaaacgccggttgcgacagagatattcagcccggcaacgttgcccgtaccgtcaatcttcacgcgcagatcgttcggatcgcgtgcggcatccggtaacccttcatattcctgacccagcaccagtaccattttcgctggcagactagttttgaacagcggtttaccctgctcgctggaagtggtcactacggtgtaacctgcctgacggaaatcatccagcacgttaacaatgttgtcgccagtaatcggctgaacgtgctctgcgccgccttctgcggtacggatagccgccccgctctccagcagtgccgcatcctgcaccacgacacctttcacgccgaagtgcgcgcagctgcgcatcatgccacccaggttatgcgggttagattcgttttccagtgccagaacgcaatcctgcgcgcctgcctggcttacccactgctgcacggttgtaccgttacgctttttgatcaagaagcaaacgccgccgtgatgttccgtgccactcgcttttgtcaattccgcttcatccaccacatggtacgctttgcggtttgctgccatccagcgcaaagcttctttaaaacgcggcgttacactctggataaaccaggcgcgaacaatcgcttccggacggctctggaaaagtgcctgacatgcattttcgccgtagacgcgggtttcttccgcacgctgacgacgcaacacttccggatcaataaaacttttaccactgatgccaccgtgatcggccttttccggcgtctcatcacccggcgcgcgggaaaccgtgcgccacgggctatcttcccacttgcggtcacggggctgactctgtttgtcatcgcgggcggggcgacggccaccgtcagcacgagattttcctggacgcccgccccctttcccggtacgcgggttgtgggtacgtttatcagaatcatcatcactgcggacatacatcactttgaccttgccgcttttacctttcatttcatcgttcatgcttttctccaccagcgctgcgcgaagcgcgcagattacccgaagtccgcgcggttcgccatgatttcgtaccaaagcctgcgactatcatacctattgaataaaacagattgttgtctggaacaatgtccccgataatatgtaacatattagaaacataccggcgtcgttgccgataagtctccttactcatcccgaggttagttatgaataccgtttgtacccattgtcaggccatcaatcgcattcccgacgatcggatcgaagatgcggcaaaatgcggacgctgcggtcacgacttgtttgacggagaggtgattaatgcgaccggtgaaacactcgacaaattgctgaaggatgatctacctgtggtgatcgacttctgggcaccgtggtgcggcccctgccgtaatttcgcaccaatttttgaagatgtcgcgcaagagcgtagcggtaaagtgcgctttgtgaaagtgaataccgaagctgaacgtgaattgagcagtcgctttggaattcgtagtataccgacgatcatgattttcaaaaacggtcaggttgtcgacatgcttaatggcgcagtaccgaaagcgccgttcgatagctggctgaacgaatctctttaatcttaccggggcgcatcttgtgccccgttttctcctctgcgacaatggcgttttttcgacgctctcttatgaccgaaaacgctgttctccagttacgcgccgagcgtattgcgcgcgcaacacgtccttttcttgcccgcggtaatcgcgttcgtcgctgccaacgctgtcttttgccagagaaattatgtctctgtagcacaattaccccagcacaagcaaaaagtcgcttctgtttgctgatgttcgacaccgagccaatgaagcccagtaataccgggcgtctcattgctgatattttgcctgataccgttgcgtttcaatggagccgtaccgaacccagccaggatttgctggagttggtgcaaaacccggactatcagccaatggtggtctttcccgctagctatgctgatgagcaacgggaagtgatcttcacaccacctgccggtaagccaccgctgtttatcatgctcgatggtacctggccggaagctcgcaagatgtttcgtaaaagtccgtatctggataatcttcccgtcatttccgtcgatctttcccggctttctgcctatcgcctgcgtgaagcccaggctgaaggccaatattgtactgccgaggtagccatcgcactgttagatatggccggcgataccggggcggcggcagggttaggcgagcattttacccgctttaaaacacgctatctggcaggaaaaacgcaacatctgggtagcatcacagcagaacagttagaaagcgtttaaaatcattcggtcacttctgcgggagaccggtatgagtcagcgaggactggaagcactactgcgaccaaaaagcatagcggtaattggcgcgagcatgaaacccaatcgcgcaggttacctgatgatgcgtaacctgctggcgggaggctttaacggaccggtactcccggtgacgccagcctggaaagcggtgttgggtgtgttggcctggccggatattgccagcttgccctttacacccgaccttgcggttttatgtaccaatgccagccgtaatcttgctcttctggaagagctcggcgagaaaggctgtaaaacctgcattattctttccgccccggcaagccaacacgaagatctccgcgcctgcgccctgcgccataacatgcgcctgcttggaccaaacagtctgggtttactggctccctggcaaggtctgaatgccagctttagccctgtgccgattaaacgcggcaagctggcgtttattagccaaagcgctgccgtctccaacaccatcctcgactgggcgcaacagcgtaagatgggcttttcctactttattgcgctcggcgacagcctggatatcgacgttgatgaattgcttgactatctggcacgcgacagtaaaaccagcgccatcctgctctatctcgaacagttaagcgacgcgcgacgctttgttagcgcggcccgtagtgccagccgtaataaaccgattctggtgattaaaagcggacgtagcccggcggcacagcgactgctcaacacgacggcaggaatggacccggcatgggatgcggctattcagcgtgccggtttgttgcgggtacaggacacccacgagctgtttagcgcggtggaaacccttagccatatgcgcccgctacgtggcgaccggctgatgattatcagcaacggtgctgcgcctgccgcgctggcgctggatgccttatggagtcgcaatggcaagctggcaacgctaagcgaagaaacctgccagaaactgcgcgatgcactgccagaacatgtggcaatatctaacccgctcgatctacgcgatgacgccagcagtgagcactatattaaaacgctggatattctgctccacagccaggattttgacgcgctgatggttattcatagccccagcgccgctgctcccgcaacagaaagcgcgcaagtattaattgaagcggtaaagcatcatccccgcagcaaatatgtctctttgctgacgaactggtgcggcgagcactccagccaagaggcacgacgtttattcagcgaagccgggctgccgacctaccgtaccccggaaggaaccatcactgcttttatgcatatggtggagtaccggcgtaatcagaagcaactacgcgaaacgccggcgttgcccagcaatctgacttccaataccgcagaagcgcatcttctgttgcaacaggcgattgccgaaggggctacgagcctcgatacccatgaagttcagcccatcctgcaagcgtatggcatgaacacgctccctacctggattgccagcgatagcaccgaagcggtgcatattgccgaacagattggttatccggtggcgctgaaattgcgtagcccggatattccacataaaagcgaagttcagggcgtcatgctttacctgcgtacagccaatgaagtccagcaagcggcgaacgctattttcgatcgcgtaaaaatggcctggccacaggcgcgggtccacggcctgttggtgcaaagtatggctaaccgtgctggcgctcaggagttgcgggttgtggttgagcacgatccggttttcgggccgttgatcatgctgggtgaaggcggtgtggagtggcgtcctgaagatcaagccgtcgtcgcactgccgccgctgaacatgaacctggcccgctatctggttattcaggggatcaaaagtaaaaagattcgtgcgcgcagtgcgctacgcccattggatgttgcaggcttgagccagcttctggtgcaggtttccaacttgattgtcgattgcccggaaattcagcgtctggatattcatcctttgctggcttctggcagtgaatttaccgcgctggatgtcacgctggatatcagcccgtttgaaggcgataacgagagtcggctggcagtgcgcccttatccgcatcagctggaagaatgggtagaattgaaaaacggtgaacgctgcttgttccgcccgattttgccagaagatgagccacaacttcagcaattcattagccgagtcaccaaagaagatctttattaccgctactttagcgagatcaacgaatttacccatgaagatttagccaacatgacacagatcgactacgatcgggaaatggcgtttgtagcggtacgacgtattgatcaaacggaagagatcctcggcgtcacgcgtgcgatttccgatcctgataacatcgatgccgaatttgctgtactggttcgcagcgatctcaaagggttaggcttaggtcgacgcttaatggaaaagttgattacctatacgcgagatcacggactacaacgtctgaatggtattacgatgccaaacaatcgtggcatggtggcgctagcccgcaagctcgggtttaacgttgatatccagctcgaagaggggatcgttgggcttacgctaaatcttgcccagcgcgaggaaagttgagtaaggtactggaaatgttgaccacttaatcgggactggtgttattattgcccgcttatgtcgtctgcattgcacagaggacccttcaatgaacagagaagaaatgcactgtgatgttgagtaaatttaagcgtaataaacatcaacaacaccttgcccaactacccaagatttctcaaagtgttgatgatgtcgatttcttttacgctcccgccgacttccgggagacgctgctggaaaaaatagccagcgcgaagcagcgcatttgcattgtcgccctgtatctcgaacaggatgacggtggcaaaggcattctgaacgcgttgtatgaggctaaaaggcagcgtccggaactggatgtgcgggtgctggtcgactggcatcgtgcacaacgtggacgcattggcgctgcggcatctaacactaacgctgactggtactgccgcatggcgcaggaaaatccgggcgtagatgttccggtttatggcgttccaatcaatactcgtgaagcccttggtgttctgcactttaaaggctttatcatcgacgatagcgtactttatagcggtgccagcctgaacgatgtttacctgcatcagcacgataaatatcgctacgaccgttatcatctgatccgtaaccgtaagatgagtgacattatgtttgaatgggttacacagaatattatgaatggccgcggcgttaatcgtctggatgatgttaatcggccaaaaagcccggaaatcaagaacgatattcgtctgttccgccaggagctgcgtgatgccgcttatcatttccagggcgatgccgacaacgatcagctttctgtaacgccgctagtggggctggggaaaagcagtctgttgaacaagaccattttccatcttatgccttgtgccgagcagaaactaaccatctgtacgccatacttcaacctgccagcaatccttgtgcgcaatattatccagttgctgcgcgaagggaaaaaggtcgaaattattgttggtgataaaaccgcgaatgacttctacattccggaagatgaacctttcaagataattggcgcattgccttatctctatgagatcaatctgcgtcgtttcctgagccgtttgcagtattacgtcaatactgaccagctagtggttcggttatggaaagatgacgacaacacctatcacctgaaagggatgtgggttgatgataagtggatgttgatcaccggtaataacctgaacccgcgcgcctggcgtctggatctggaaaacgccattttgatccacgatccgcaacttgagctggcgccacagcgagagaaagaactggagctgatccgcgagcataccaccatcgttaagcactatcgcgatctgcaaagtattgccgattatccggtgaaggttcgtaaactcatccgccgtttgcgccgtatccgcatcgaccgattaattagccgcatcctgtaatcacaaccccgtcctgtacggggtttgttttttggaggccacgttttgcgtattctttttgtctgttcgctattgttactttctggatgcagccatatggctaacgatagctggagcgggcaggataaagctcaacactttatcgccagcgcgatgctttccgccgccggaaatgaatatagtcagcatcaggggatgagccgggatcgcagtgccatgtttggattgatgttctctgtcagtttgggggcgagtaaagagctttgggatagccgccccgaagggagcggctggagctggaaggatttggcctgggatgtcgccggtgcaagcaccggctataccgtctggcaactgacccgtcattaaagacgcatccccttccctttgcgatgtagcatcaaagaaaccagaaacgccaccacggccatcaaggtcacataccagaagaaggctgtttccattcctatacttttcaggctcaacgctacgtactccgcgctaccaccaaatatagcattagcgaccgcataactcagaccaacgcctaatgcgcgaacctgtgccgggaacatctcagccttcagtattccactgatacttgtataaaaactcactatcagcagggcacacatcaccagaccaaaagcggcataagggctggaaacgttttgcaatgcactgagaataggaacggtaaaaatggctgccaggctaccgaaacataacatactggtacggcgaccaatcttatcgctcagcgcgccaatgagtggttgaataagcatgaatacaaacaatgcggcagtcataatgccactcgccacgttggcatgcattcccgcagtatttaccagatacttctgcatataagtagtgaaggtatagaaacaaagggagcccgcagcggtaaaaccgagaaccatgatgaatgcacggcgattgcgccataatcctttcagagatccagcttcttttaaagcgcgcgtttcttgttggctagtttcatctaactgacgacgtaaccacaacgccacaacagctaacacagctcctaacgcgaaaggaatacgccatccccactctctgagtgcagcgtcttccatggtgtgttgtaaaaccacgacaaccagtagggctagcagttgtccgccgatcaacgtcacatactgaaaacttgcgtaaaaacctttgcgcccttcaacggcaacttcactcatataggtggcgctggtgccatattctccgccaacagataatccctgaaataaacgagcgagaagcaataatgccggagcccacgtacctatagtttcataacctgggaggcaggcgataaccaggcttccgaaacacatcatacacacgcttaacagcatgctttttttgcgaccatgtttatcggctatgcggccaaatagccaaccgcctattgggcgcatcaggaatcccgcagcaaaaacacctgctgtttgtagtagttgagtcgtcgtgttcccggaagggaagaagatgtgggcaaagtagagactacagaagctgtagacatagaaatcgaaccactcgaccagattaccactagaggcccccacaatcgcccaaatgcggcgacgagtatcactacttgtcagtttgctgtctgccgttacagtactttcagccatgccattatgtctcctgccgtaatccgatgcttttgtcggtcgcttttgtttattttttttgtaaaggaaatattatacatttgttgcatatcattatgcaaccttaaccatgaatttagttagcaggaaaatggttattgaggagcttaaggataaatttctggtaaggaggacacgtatggaagtgggcaagttggggaagccgtatccgttgctgaatctggcatatgtgggagtataagacgcgcagcgtcgcatcaggcatttttttctgcgccaatgcaaaaaggccatccgtcaggatggcctttcgcataatttgatgcctggcagttccctactctcgcatggggagaccccacactaccatcggcgctacggcgtttcacttctgagttcggcatggggtcaggtgggaccaccgcgctacggccgccaggcaaattctgttttatcagaccgcttctgcgttctgatttaatctgtatcaggctgaaaatcttctctcatccgccaaaacagcttcggcgttgtaaggttaagcctcacggttcattagtaccggttagctcaacgcatcgctgcgcttacacacccggcctatcaacgtcgtcgtcttcaacgttccttcaggacccttaaagggtcagggagaactcatctcggggcaagtttcgtgcttagatgctttcagcacttatctcttccgcatttagctaccgggcagtgccattggcatgacaacccgaacaccagtgatgcgtccactccggtcctctcgtactaggagcagcccccctcagttctccagcgcccacggcagatagggaccgaactgtctcacgacgttctaaacccagctcgcgtaccactttaaatggcgaacagccatacccttgggacctacttcagccccaggatgtgatgagccgacatcgaggtgccaaacaccgccgtcgatatgaactcttgggcggtatcagcctgttatccccggagtaccttttatccgttgagcgatggcccttccattcagaaccaccggatcactatgacctgctttcgcacctgctcgcgccgtcacgctcgcagtcaagctggcttatgccattgcactaacctcctgatgtccgaccaggattagccaaccttcgtgctcctccgttactctttaggaggagaccgccccagtcaaactacccaccagacactgtccgcaacccggattacgggtcaacgttagaacatcaaacattaaagggtggtatttcaaggtcggctccatgcagactggcgtccacacttcaaagcctcccacctatcctacacatcaaggctcaatgttcagtgtcaagctatagtaaaggttcacggggtctttccgtcttgccgcgggtacactgcatcttcacagcgagttcaatttcactgagtctcgggtggagacagcctggccatcattacgccattcgtgcaggtcggaacttacccgacaaggaatttcgctaccttaggaccgttatagttacggccgccgtttaccggggcttcgatcaagagcttcgcttgcgctaaccccatcaattaaccttccggcaccgggcaggcgtcacaccgtatacgtccactttcgtgtttgcacagtgctgtgtttttaataaacagttgcagccagctggtatcttcgactgatttcagctccatccgcgagggacctcacctacatatcagcgtgccttctcccgaagttacggcaccattttgcctagttccttcacccgagttctctcaagcgccttggtattctctacctgaccacctgtgtcggtttggggtacgatttgatgttacctgatgcttagaggcttttcctggaagcagggcatttgttgcttcagcaccgtagtgcctcgtcatcacgcctcagccttgattttccggatttgcctggaaaaccagcctacacgcttaaaccgggacaaccgtcgcccggccaacatagccttctccgtccccccttcgcagtaacaccaagtacaggaatattaacctgtttcccatcgactacgcctttcggcctcgccttaggggtcgactcaccctgccccgattaacgttggacaggaacccttggtcttccggcgagcgggcttttcacccgctttatcgttacttatgtcagcattcgcacttctgatacctccagcatgcctcacagcacaccttcgcaggcttacagaacgctcccctacccaacaacgcataagcgtcgctgccgcagcttcggtgcatggtttagccccgttacatcttccgcgcaggccgactcgaccagtgagctattacgctttctttaaatgatggctgcttctaagccaacatcctggctgtctgggccttcccacatcgtttcccacttaaccatgactttgggaccttagctggcggtctgggttgtttccctcttcacgacggacgttagcacccgccgtgtgtctcccgtgataacattctccggtattcgcagtttgcatcgggttggtaagtcgggatgacccccttgccgaaacagtgctctacccccggagatgaattcacgaggcgctacctaaatagctttcggggagaaccagctatctcccggtttgattggcctttcacccccagccacaagtcatccgctaatttttcaacattagtcggttcggtcctccagttagtgttacccaaccttcaacctgcccatggctagatcaccgggtttcgggtctataccctgcaacttaacgcccagttaagactcggtttcccttcggctcccctattcggttaaccttgctacagaatataagtcgctgacccattatacaaaaggtacgcagtcacacgcctaagcgtgctcccactgcttgtacgtacacggtttcaggttctttttcactcccctcgccggggttcttttcgcctttccctcacggtactggttcactatcggtcagtcaggagtatttagccttggaggatggtccccccatattcagacaggataccacgtgtcccgccctactcatcgagctcacagcatgtgcatttttgtgtacggggctgtcaccctgtatcgcgcgcctttccagacgcttccactaacacacacactgattcaggctctgggctgctccccgttcgctcgccgctactgggggaatctcggttgatttcttttcctcggggtacttagatgtttcagttcccccggttcgcctcattaacctatggattcagttaatgatagtgtgtcgaaacacactgggtttccccattcggaaatcgccggttataacggttcatatcaccttaccgacgcttatcgcagattagcacgtccttcatcgcctctgactgccagggcatccaccgtgtacgcttagtcgcttaacctcacaacccgaagatgtttcacttcagagttgcgaaaatttgagagactcacgaacaactttcattgttcagtgtttcaattttcagcttgatccagatttttaaagagcaaatatatcaaacaagacttaacagtctgttttgagatattgaggtcggcgactttcactcacaaaccagcaagtggcgtcccctaggggattcgaacccctgttaccgccgtgaaagggcggtgtcctgggcctctagacgaaggggacacgaaaattgcttatcacgcgttgcgtgatattttcgtgtagggtgagctttcattaatagaaagcgaacggccttattctcttcagcctcactcccaacgcgtaaacgccttgctattcacttttcatcagacaatctgtgtgagcactgcaaagtacgcttctttaaggtaaggaggtgatccaaccgcaggttcccctacggttaccttgttacgacttcaccccagtcatgaatcacaaagtggtaagcgccctcccgaaggttaagctacctacttcttttgcaacccactcccatggtgtgacgggcggtgtgtacaaggcccgggaacgtattcaccgtggcattctgatccacgattactagcgattccgacttcatggagtcgagttgcagactccaatccggactacgacgcactttatgaggtccgcttgctctcgcgaggtcgcttctctttgtatgcgccattgtagcacgtgtgtagccctggtcgtaagggccatgatgacttgacgtcatccccaccttcctccagtttatcactggcagtctcctttgagttcccggccggaccgctggcaacaaaggataagggttgcgctcgttgcgggacttaacccaacatttcacaacacgagctgacgacagccatgcagcacctgtctcacggttcccgaaggcacattctcatctctgaaaacttccgtggatgtcaagaccaggtaaggttcttcgcgttgcatcgaattaaaccacatgctccaccgcttgtgcgggcccccgtcaattcatttgagttttaaccttgcggccgtactccccaggcggtcgacttaacgcgttagctccggaagccacgcctcaagggcacaacctccaagtcgacatcgtttacggcgtggactaccagggtatctaatcctgtttgctccccacgctttcgcacctgagcgtcagtcttcgtccagggggccgccttcgccaccggtattcctccagatctctacgcatttcaccgctacacctggaattctacccccctctacgagactcaagcttgccagtatcagatgcagttcccaggttgagcccggggatttcacatctgacttaacaaaccgcctgcgtgcgctttacgcccagtaattccgattaacgcttgcaccctccgtattaccgcggctgctggcacggagttagccggtgcttcttctgcgggtaacgtcaatgagcaaaggtattaactttactcccttcctccccgctgaaagtactttacaacccgaaggccttcttcatacacgcggcatggctgcatcaggcttgcgcccattgtgcaatattccccactgctgcctcccgtaggagtctggaccgtgtctcagttccagtgtggctggtcatcctctcagaccagctagggatcgtcgccttggtgagccgttaccccaccaacaagctaatcccatctgggcacatccgatggcaagaggcccgaaggtccccctctttggtcttgcgacattatgcggtattagctaccgtttccagtagttatccccctccatcaggcagcttcccagacattactcacccgtccgccactcgtcagcgaagcagcaagctgcttcctgttaccgttcgacttgcatgtgttaggcctgccgccagcgttcaatctgagccatgatcaaactcttcaatttaaaagtttgatgctcaaagaattaaacttcgtaatgaattacgtgttcactcttgagacttggtattcatttttcgtcttgcgacgttaagaatccgtatcttcgagtgcccacacagattgtctgataaattgttaaagagcagtgccgcttcgctttttctcagcggcgcggggtgtgcataatacgccttcccgctacagagtcaagcatttctttgcttttctctgttgagattctcaggagaaccccgccgacccggcggcgtgtttgccgttgttccgtgtcagtggtggcgcattatagggagttattccggcctgacaagcgaaaaatataaaaactttatcgttcgctcacttttcaggcaaaacatcttaaatatagtcttttccgtctaacttatagacaaaaacgagccccgaagggctcgttttatcatttactggacggcgacaatccggtcttcattaacttccaggcgaatcactttacccggaaccaattcaccagacagtatttgctgtgccagcgggttttcgatctgctgctgaattgcacgtttcagaggacgtgcaccatagaccggatcgtaaccgttctcgctcagcagtttcagcgcctcgtcagaaatgtggatttcataaccacgttcttccagacgtttgtacagacgtttcaactgaatctgcgcaatgctggcaatgtgctgttcacccagcggatggaagaccaccacttcatcgatacggttaatgaattccggacggaagttatggcttaccacaccgagcaccagctctttcatgtgcgcataatccagttcaccgaagcgttcctgaatcagatcggaaccgaggttagaggtcataatgacgaccgtattacggaagtcgaccgttctcccttgcccgtcagtcagacgcccatcatccagtacctgcaacagaatgttgaagacatccggatgcgctttttccacttcatccagcaggatgacggaatacggacgacgacgcaccgcttcggtcaggtagccaccttcttcataaccgacatatcccggaggcgcaccaaccaaacgagacacgctgtgtttctccataaactcggacatatcgatacggaccatcgcctcgtcgctatcaaacataaagttcgccagcgccttacaaagctctgttttccccacaccagttgggccgaggaacaggaaactaccaatcgggcgatttggatccgccagccccgcacggctacgacgaatagcgttagataccgcatcaaccgcttcgttctgaccaattacgcgatggtgcagttcttgctccatacgcagcagtttttcgcgctcgctttccatcatgcgagaaaccggaatccccgtccaacgcgccagcacttcagcaatttcggcgtcggtcactttattacgcaacagacgcatagttttgccttcgagctgcgttgcggcttccagttgcttttccagttccgggattttgccgtattgcagttcagacatccgcgccaggtcccccacacggcgagcctgttcaatagcgattttcgcctgttccagttccgctttaatggtctgcgtaccagaaaggcttgccttctctgctttccactcttcttctaactcggagtactgacgttctttgtcgctcagttcttcgttgagcatatccagacgttttttactggcttcatcagactctttcattaacgcctgttgttccagtttgagctggatgatacgacgatcgagtcggtcgagttcttctggtttactgtcaatctgcatacgaatgctggatgctgcttcatcgatcaggtcgatggctttatccggcagctgacggtcagcaatgtagcgatgagacaacgtcgccgctgcaacaattgccgggtcagtaatttgcacatggtggtgcaattcgtaacgttctttcaggccacgcagaatcgcaatggtatcttcaacagaaggctcggcaacaaacactttctggaaacgacgttccagcgcagcatctttttcaatgtactggcgatattcgtcaagcgtcgtggcacctacgcagtgcaattcaccacgcgccagcgccggtttcagcatgtttccggcgtccattgcgccatcggctttacccgcgccgaccatggtatgtaattcgtcgataaataggatgacgttgccttcctgtttggcaagatcgttaagcacgccttttaaacgttcttcaaactcaccgcgatatttcgccccagccaccagcgcgcccatatccagcgccagtacccggcggcctttcaacccttccggcacttcgccgttgataatacgctgcgccagaccttcaacgatggcagttttaccgacgccgggttcaccaatcagtaccgggttatttttagtacgacgttgcagcacctgaatggtacggcgaatttcttcatcacgaccaatcaccggatcgagtttgccctgttcggctcgttcggtaaggtcgatggtatattttttcaaagcctgacgttggtcttcagcaccttgatcgttcacgctttcacctccacgcatttgttcaatcgcttgagtaatgttggcggtggtcgcccctgctgctttcaggatgtcggccagcgtgccgcgagactcaagtgccgccagaacgaacagttcactgctgataaagttatcaccacgtttttgcgccagcttgtcgcaaagattaagaacgcgcaccagatcctgacttggctggacatcaccaccagtaccttcaacctgcggtaaacgatttaatgcctgattgatatctgtgcgcaactggccagcatttatgccagcggatgttaataaaggactaacgctacccccttcctgattcagcagggcgctcattaaatgaagtggttcgataaattggttgtcgtgcccgagtgcaagactttgggcatcggcaagagcaagctggaatttattagtaagacgatccagacgcataactcctcccataacggatcaaagttgctactggagattaaatgaggtcatccctcaattattcaaggttattgaccagattaatgtgaaaagaaaatcacgcgtaccggatcgtcttgattctttaggttatatcagccaaatgaaacttgccatacgaccggtggtcttgtcgcgacgataagagaagaaagtctcattttccgtatatgtacaacggtcgccgccgaaaatttgctcaacacccacgttcgccagacgctgccgggcaagctgataaatatccgccagatacttatcaccatgctgaatgaaagctgcacttgctttagcgtctactgccataaacgcctcgcgaacctccccccccacttcgaacgcgcgtggaccaattgccggccctaaccaggcgagaatattttccggattatcagcaaaacaggaaaccgtctcttccagcacgcctgcgcacagtccacgccagccagcatgagcggcggcgacttccgttcccgctcgattgcaaaacagcacagggaggcagtcggcagtcatcactgcgcaaaccgtgccgggcgtattgctataagaggcatccgcccgtttactggcataaggttcgccagtgagcttaagcacatctttgccgtgtacctgctcaagccagaccggtttagaaggcaaattgcccgcagcaaaaagtcgcttgcgattctcctcaacgtgatccgggttatcgccacaatgggcaccgaggttgagactgtcatacgggggcaagctcacgccgccgatacgagtggagctacaggccgcaacaccttttggctgcggccactgcgggacaatcagcttactcataaccagtccacttcatccttatgttcttcgaaatcggcgcgcatcacctcaatcagctccaccatatcttgtggaataggcgcatgccattccatttcgatgccggagatcgggtgataaagacgcagcatggttgcatgtagcgcctggcggtcaaacttacgcagcgtggagataaatgcttcgctagcaccttttggcggacgcggacggccaccataaaccggatcgcccaccagcggatgagtgatatgggccatatgcacgcggatctggtgcgtacgtccagtttccagacgcaaccgcagacgcgtgtgcacacggaagtgttccatgatgcgatagtgagtcaccgctggtttgcccatcggatgcaccgccatatgggtacgtttggtcgggtggcgactgattggctcgtccaccgtgccacctgcggtcatatgaccaatcgccaccgcttcatactcacgagtaatttcacgccgttgcaaagattcgactaaacgcgtctgagccggaacggtttttgccacaaccatcaggccagtggtgtctttatccagacgatggacgatgcccgcacgcggtacatcggcaatgggtggatagtaatgaagcaacgcattcagtaccgtgccatccgggttacccgcgccaggatgtaccaccaggtcgcgcggtttattaatgataataatgtcttcatcttcatagacgatatccagcgggatatcctgcggttcaaaacgcgcttcttcttcaatctcagcgttgatggcaacctgctcgccacccaatactttttctttcggcttatcacaaactttgccgttaaccagcactcgctggtcgaggatccattcttttattcggctacgactataatccgggaacatttcggccaaagcctgatctaagcgttgaccgagttggttttcggacaccgttgcagtgagctgtactcgttgtgccatatatactgcttcttcgtttatcgttggggttttacggctttgccgtttaatatagtgtgctattgtagctggtcttaaccgggagcaggaacagagaatctcccgtattacattttgaggaaagtcaaaacgtcatgacgcgcatgaaatatctggtggcagccgccacactaagcctgtttttggcgggttgcagcgggagtaaggaagaagtacctgataatccgccaaatgaaatttacgcgactgcacaacaaaagctgcaggacggtaactggagacaggcaataacgcaactggaagcgttagataatcgctatccgtttggtccgtatagccagcaggtgcagctggatctcatctacgcctactataaaaacgccgatttgccgttagcacaggctgccatcgatcgttttattcgccttaacccgacccatccgaatatcgattatgtcatgtacatgcgtggcctgaccaatatggcgctggatgacagtgcgctgcaagggttctttggcgtcgatcgtagcgatcgcgatcctcaacatgcacgagctgcgtttagtgacttttccaaactggtgcgcggctatccgaacagtcagtacaccaccgatgccaccaaacgtctggtattcctgaaagatcgtctggcgaaatatgaatactccgtggccgagtactatacagaacgtggcgcatgggttgccgtcgttaaccgcgtagaaggcatgttgcgcgactacccggatacccaggctacgcgtgatgcgctgccgctgatggaaaatgcataccgtcagatgcagatgaatgcgcaagctgaaaaagtagcgaaaatcatcgccgcaaacagcagcaatacataacagaaacctgaaacacaaaacggcagcccttgagctgccgtttttttattctgtcagttgtgaaactgaagcgatttagtcgctatcgatctcatcaaatatggctcgctttgagatattcctcaagtaaaaaaacatctcttcctgcgatttctcacaaaaaagattcgttgacaaaaagtgacaaaattatgagattttcatcacacattttgacatcaggaacggtatgctgaattcaccaagacgggaagacaagaggtaaaatttatgacaatgaacattaccagcaaacaaatggaaattactccggccatccgccaacatgtcgcagaccgtctcgccaaactggaaaaatggcaaacacatctgattaatccacatatcattctgtccaaagagccacaagggtttgttgctgacgccacaatcaatacacctaacggcgttctggttgccagtggtaaacatgaagatatgtacaccgcaattaacgaattgatcaacaagctggaacggcagctcaataaactgcagcacaaaggcgaagcacgtcgtgccgcaacaagcgtgaaagacgccaacttcgtcgaagaagttgaagaagagtaatcctttatattgagtgtatcgccaacgcgccttcgggcgcgttttttgttgacagcgtgaaaacagtacgggtactgtactaaagtcacttaaggaaacaaacatgaaacacataccgtttttcttcgcattcttttttaccttcccctgaatgggaggcgtttcgtcgtgtgaaacagaatgcgaagacgaacaataaggcctcccaaatcggggggccttttttattgataacaaaaaggcaacactatgacaagcgaaaacccgttactggcgctgcgagagaaaatcagcgcgctggatgaaaaattattagcgttactggcagaacggcgcgaactggccgtcgaggtgggaaaagccaaactgctcagccatcgcccggtacgtgatattgatcgtgaacgcgatttgctggaaagattaattacgctcggtaaagcgcaccatctggacgcccattacattactcgcctgttccagctcatcattgaagattccgtattaactcagcaggctttgctccaacaacatctcaataaaattaatccgcacagtgcacgcatcgcttttctcggccccaaaggttcttattcccatcttgcggcgcgccagtatgctgcccgtcactttgagcaattcattgaaagtggctgcgccaaatttgccgatatttttaatcaggtggaaaccggccaggccgactatgccgtcgtaccgattgaaaataccagctccggtgccataaacgacgtttacgatctgctgcaacataccagcttgagcattgttggcgagatgacgttaactatcgaccattgtttgttggtctccggcactactgatttatccaccatcaatacggtctacagccatccgcagccattccagcaatgcagcaaattccttaatcgttatccgcactggaagattgaatataccgaaagtacgtctgcggcaatggaaaaggttgcacaggcaaaaagtccgcatgttgctgcgttgggaagcgaagctggcggcactttgtacggtttgcaggtactggagcgtattgaagcaaatcagcgacaaaacttcacccgatttgtggtgttggcgcgtaaagccattaacgtgtctgatcaggttccggcgaaaaccacgttgttaatggcgaccgggcaacaagccggtgcgctggttgaagcgttgctggtactgcgcaaccacaatctgattatgacccgtctggaaagtcgcccgattcacggtaatccatgggaagagatgttctatctggatattcaggccaatcttgaaagtgcggaaatgcaaaaagcattgaaagagttaggggaaatcacccgtagtatgaaggtattgggctgttacccaagtgagaacgtagtgcctgttgatccaacctgatgaaaaggtgccggatgatgtgaatcatccggcactggattattactggcgattgtcattcgcctgacgcaataacacgcggctttcactctgaaaacgctgtgcgtaatcgccgaaccagtgctccaccttgcggaaactgtcaataaacgcctgcttatcgccctgctccagcaactcaatcgcctcgccgaaacgcttatagtaacgtttgattaacgccagattacgctcactgctcataatgatgtcggcataaagctgcggatcctgagcaaacagtcgcccgaccatcgccagctcaaggcggtaaatcgggctagagagcgccagaagttgctcaagctgaacattttcttctgccaggtgcagcccgtaagcaaaagtagcaaagtggcgcagtgcctgaataaacgccatattctgatcgtgctcgacggcgctaatacgatgcagccgagcgccccagacctgaatttgctccagaaaccattggtatgcttccggtttacgtccatcacaccagaccacaacttgctttgccaggctaccgctgtccggaccgaacatcgggtgtagccccagcaccggaccatcatgcgccaccagcatggcctgtaatggcccatttttcacacttgccagatcgaccagaatacaatctttcggtaaaggcggtaatttgccaataacttgctcagtaacgtggattggcacactaacaatcaccattccggcatcggcaacaatatcagccgctcgatcccagtcatgttgctccagaatccgcacctgataaccgctgagggtcagcatcttctcgaacaggcgtcccatctgaccgccaccgccgacgataaccaccggacgcagactcggacaaagtgttttaaatcctttgtcgttttcactggagtaagattcacgcatcacccgacgcaaaacatcctcaatcagatctggcggtacacccagagcttccgcctctgcacgacggctggccaacatagatgcctcgcgctccggaacataaataggcagtccaaagcggcttttcacctcgcccacttcagcaaccagttccagacgcttcgctaataaattcagcagcgctttatcgacttcatcaatttgatcgcgtaatgcggtcaattcagcaaccataataaacctcttaagccacgcgagccgtcagctgcccgttcagatcctgatgaatttcacgcagcaaggcatcggtcatttcccagctaatgcaggcatcggttacggatacaccgtatttcatttcactgcgcggttgctcggaagactgattgccctcgtggatattactttcgatcatcagaccaataatactgcgattgccatctttgatttgagcaaccacggattctgccaccgcaggctgacggcgataatctttattggaattaccgtggctgcaatctaccatcagagacgggcgcagtcccgcctgttccatctctttttcacattgcgcaacatccgcagggctatagttcggcgctttaccaccgcgcaggatcacatggccgtccggattcccctgagtttgtagcaacgcaacctgccctgcctggttaatgccaacaaaacggtgcggctgggcggcggcgcgcatagcgttaattgctgttgccagactgccgtcggtgccgtttttaaaaccaaccggcatggaaagcccggaggccatttcacggtgagtttggctttccgttgtacgagcaccaattgcactccagctaaacagatcgcccaggtattgcgggctattcggatctaacgcttccgtcgccagtggcagtcccatattcaccagctcaagcagcaatttacgcgcgatctgcagcccggcttctacatcaaaagagccatccatatggggatcgttaattaaccctttccagccgacagtggtacggggtttttcaaaatagacgcgcattaccagatagaggctatcgctgacctctgcggcaagggctttaaatcgacgagcatattccagagcagtttccggatcatgaatggaacaaggaccacatactaccagcagacgaggatcgcgcccggcgataatatcactaatgcttttacggctgtcagcaatctgggcttcttgttgcaggctcaatggaaaagcggccttcagttgttccggagtcattaaaacctgttcgtcggtaatatgtacgttattcagcgcgtctttttgcatgatggcgatcctgtttatgctcgtttgcgatagttgatcctcagcgaggatgacgtaacgataacacataaagtaaagttttcaatccatatttcgtacatttttatttacacaggcaatttagtcgcgctttcaacccttacctctgtatagataaatttacactccctttgaaaacaatccgctatgctttgaaaaaggagaaagaaatgatgaaaaagtttatcgcccccttgttggctttactggttagcggatgtcagattgatccttatactcacgcgccaaccttgaccagcaccgactggtatgatgtcggtatggaagatgcgataagcggcagcgccataaaagatgacgatgcatttagcgatagtcaggcggatcgcggtctataccttaaaggatatgccgaaggacaaaagaaaacttgccagaccgattttacttatgcccgaggactttccggtaaaagctttcctgccagctgcaacaatgttgaaaatgccagccaactgcatgaagtaggcaaaaaggggctgatgaaaatgccagcacaatacgattaaattaattaaaaccccacaaataaattaaacataagattttactcattgtgttttatttctcacattgatgacggtcgcatgaaaaaatgatattttaatgagcattctgaaaaaatatcgatgcatttcgagcgaagatggtggggatccctgaatgcgtttttctcaccgactgttcttacttctgattctcctgctgacgggagcaccaatactcgctcaggagccttctgacgttgcgaaaaacgtgcgtatgatggtttccggtattgtcagttacacccgctggcctgcgctaagtgggccaccaaagttatgtatctttagttctagtcgttttagtaccgccctacaagagaatgccgcgacatctttgccttatctgcctgtcatcattcacactcaacaagaggcgatgattagtggctgcaatggtttttattttggcaacgagagtccgacattccagatggaattaaccgaacaatatccgagtaaggcgttattattaattgccgaacaaaataccgagtgcattattggtagcgccttttgtctgatcatccacaataatgacgtcagatttgccgtaaacctggatgccttaagccgtagcggtgtaaaggtcaacccggatgtcttaatgctcgcacggaagaaaaatgatggataacgataattctcttaataagcgccccacgtttaaaagagcattacgcaacatcagtatgaccagcatatttatcactatgatgctgatctggttgctgctttccgtgaccagcgtgctgaccctgaaacagtacgcgcaaaaaaacctggcactgacagcagcaacaatgacttacagtctggaagcagctgtcgtttttgccgatggccctgcagcaactgaaacactggcagcgctgggccagcaagggcaatttagtactgcagaagtacgtgataagcagcaaaatattctggcatcctggcattacacccgtaaggatccaggcgatactttcagtaatttcataagccactggctcttccctgcccccatcattcagccgattcgtcacaatggtgaaaccattggcgaagtacgcttaaccgctcgcgacagtagtatcagccattttatctggtttagcctcgccgtactgaccggttgtattctgctggcaagtggcatcgcaattaccctcacccgccatttgcacaatggcctggtagaagcgctgaaaaatatcaccgatgtcgtacatgatgtgcgttccaaccgcaatttttcccgacgagttagcgaagaacgtatcgctgagtttcaccgcttcgctctcgacttcaacagtctgctggatgaaatggaagagtggcagcttcgtttacaggctaaaaatgcgcagcttctacgtaccgcgctacatgacccattaaccgggctggctaaccgcgcagcgtttcgtagcggcatcaacacgttgatgaacaattccgatgcccgaaaaacgagcgcgttactatttcttgatggcgataatttcaaatacatcaatgatacctggggtcatgcgacgggcgatagagtcttgattgaaatcgcaaaacggttagctgaatttggcgggctgcgacataaagcataccgcctgggcggcgatgaattcgctatggtgctctatgatgtacagagcgaatctgaagtgcagcagatatgtagtgcactgacacaaatctttaatctcccgtttgatcttcataatggccatcagaccaccatgacattaagcattggttacgcgatgaccattgagcacgcctctgcggaaaaattacaagagcttgccgatcacaatatgtatcaggccaaacaccagcgtgccgaaaagctggtgagataacaaggatatatcgatatgataaagcacctggtagcacccctggttttcaccagtctaatactgactggctgccagtcccctcagggaaagtttactcctgagcaagtcgccgctatgcaatcttatggatttactgaatccgccggcgactggagcctgggcttaagtgatgccattctgttcgcaaaaaatgactacaaattgctcccggaaagccagcaacagatccaaaccatggcagctaaattggccagcacagggctaacacatgcccgtatggatggacacaccgataactatggtgaagacagttacaacgaaggcttaagtttgaaacgggcgaatgtcgtggccgatgcatgggctatgggtggacaaattccacgcagcaatctcaccacacagggtttaggaaaaaaatatcccatagccagtaacaagaccgcccagggccgcgccgagaaccgccgcgtcgcagtggtgattactaccccttaaaacaccagcaaacagataaaaaagggccagccaattggccagcccttcttaacaggatgtcgcttaagcgaaatcttagttaagacgctctttgatacgagcagccttaccagtacgctcacgcaggtagtacagtttagctttacgaacagcaccacgacgtttgacagaaatgctgtcaactaccggagagtgagtctggaagacacgctcaacgccttcgccgttggaaattttacgaacagtgaatgcagagtgcagaccgcggttacgaatagcgataaccacgccctcgaatgcctgcagacgttttttggaaccttcaacaacccatactttcacttccacggtatcacccggacggaaggaaggtacgtcctgcttcatctgctcttgttcaagttgcttaataatgttgctcataatttaatctcttatcctgggtaaactgatatctcgggggcttacgccatcccatcatgtttatgttgctgttgtgcgtgttccgttttgaactccgccagcaaccttgcttgctcttcagtcagagccaggttttccagaagttcaggtcttctaagccaggtacggcccaggctctgtttcaaacgccagcgacgtatctcggcatggttgccgctcagtaacactggcggaacttccatcccttctaacacctcaggccgcgtatagtgcgggcaatccagcaatccttcagcaaaggaatcttccgttgcgctggcttcatgtcccagtactcccggaataaaccgggaaacggagtcaatcagcgtcattgctggtaactcaccaccactgagaacgtaatcgccgatactccattcttcgtcaatttcggtttggatcacgcgctcatctataccttcgtagcgaccgcacaccagaatcaatttttgattcgttgccagttcgctgacgcccgcttgatcaagcttgcgtccctgtggactcagataaatcacctttgcgccttcacccgccgcggcttttgctgcatgaatggcgtcccgcaagggttgcaccatcattaacatccccggtccgccgccgtaaggacgatcgtccacggtacggtgccggtcatgcgtgaagtcgcgaggactccagctctggatgctcagcaggccatttttaactgcccggccagttaccccgtaatcggtaattgcgcggaacatttcaggaaacaggctaattatgccaatccacatagcgccgtcttttaccgtttatccggtggtttaaaaaccaggatcccaatctacttcgatactacgagtagtgagatcgactttcttgataacctgcccatcgaggaacggtacgagacgttccttgataccaaacgcatctttcaggtttgccttaatgacgagaacgtcattagatccggtttccatcatatcgacgactttaccgagatcgtagccttcagtggttactacctggcagcccatcaggtctttccagtagtagtccccctcttcaagctgaggcagctggctactatccacgacaatttcacaattcgtcagcaggttcgccgcatcacgatcgtcaacgcctttcagcttgatgatcatgtcctgattgtggtgcttccagctttccagctggacttgctgccactgacccgccttctggataaaccagggctgatagtcaaaaatgctttcggcgtcttcggtggaagaaaacactctgagccacccacgaataccgtaagagctacccatttttcccaaaacgatgggatcaacaggtgcttgcgcggtgagttgtttgctcatcatgaccaccgtgacagattaagctgctttgtttacttctttgatcagcgcagcaacgcgatcagaaatagttgcgccctggccaacccagtgagcgatgcgatccagatccaggcgagtgccttcttctttttcgctagcgattgggttgaagaaaccaacgcgctcgatgaagcgaccgttgcgtgcattacggctgtcagcgacaacaacctggtagaacggacgctttttagcgccgtgacgtgctaaacgaatagttaccataacatcctcttgtgtgaataaaacaaccggaccccatcgaggaacggagtccggtgtcatattaaaagcccgaaaattttactcatttttgcgggaattgcaatcaacagttgctaactctgctgtaaaaggccgtcggcggtgcagccagtttggtgccggagtgcgcgcagtcaccggagcgtacacgcagtacgtgaggatgacgagcacatcccggtgccaaaatggcaaacaagccaggccgattagcgaccagggaagcctgggggcatcatacccttcatgcttctcatcatcttcgccattccgcccttcttcattttcttcatcatgcgctgcatgtcgtcgaactgtttcagaagacggttaacgtcctgcacctgcataccgcaaccggcagcaatacggcgtttacggctacctttgatgatttctggcttagcgcgctctttcatcgtcatgctgttgatgatggcttccatacgcaccagcactttatcgtccatctgactcttgacgttatccgggatctgccccatgcccggcagcttgcccatcagactagccatgccgcccatatttttcatctggcgcagctgctcaagaaagtcgttgagatcgaagccgtcaccttttttcagcttgctggctaatttctctgcctgcgcgcggtcaactttgctttcgatatcttcgatcaggctcagtacgtcgcccatgccgagaatacggctcgcgatgcggtccggatggaacggctccagcgcctcagttttctcgccaacaccgaggaacttgatcggtttgccagtgatgtgacgaatagagagcgccgcaccgccgcgggcatcgccgtccactttggtcaacactacgccggtaagcggtaacgcttcattgaatgcttttgccgtattggccgcatcctgaccggtcatggcgtcaaccacaaacagggtttcaaccgggttaatgctcgcatggacttgtttgatctcgtccatcatcgcttcgtcaacgtgcagacgaccagcggtatccaccagcagcacgtcgtagaatttcagtttggcttctttcagcgccgcgttaacgatatctaccggcttctgaccaacatcagaagggaagaaatcaacgcccacctgctctgccagcgtctcaagctgtttgattgccgccgggcgataaacgtcggcagaaaccaccagcactttcttcttgtgcttctcgcgcaggaacttaccgagtttaccaacgctggttgttttaccggcaccttgcaggcccgccatcagtacgaccgcaggcggttgcgcagccaggttcagggtctggttctcttcgcccatcgccgcaaccagttcgttacggactattttgacgaactcctgccccggcgtcaggctcttattaacttcatgaccaaccgctttctcttttacgcgattgataaactcacgcactaccggcagagctacgtccgcctccagcagcgccatgcgcacttcgcgcagcgtatcttttacgttgtcttcagtgaggcgtccacggccactgatattgcgcagcgtgcggctcaaacgatcggttaaattatcaaacattgtctctcgcctggggtggaaacggttggccgcaatcgcgacacatcatcagtattttgccgcagtataacatgaaggcgtctttgttgttatgcaacggttggagcagcgtagtcctgacgctatactgcttctctttcttattgctcaaactgtcgacatcactatgcccgtttttgctctgctcgcgcttgtcgcctactccgtcagtcttgcgctgattgttcccggtctgctgcaaaaaaacggcggctggcggcgcatggctattatttctgcggtcattgcgctggtctgccacgcaatcgctctggaagcccgcatcctgcccgacggtgatagcggacaaaacctcagcctgctgaacgttggtagtttggtcagtttgatgatctgtacggtaatgaccattgtggcttctcgcaatcgtggctggctgctgctacccattgtctatgcctttgcgcttatcaacctggcgctggcaaccttcatgcccaatgaatacatcacccatctggaagctacgcctgggatgctggtgcacattggcttaagcctcttttcctatgccacgctaattatcgccgccctgtacgcgctgcaactggcgtggattgattaccaactgaagaacaagaagctggcgtttaaccaggaaatgccgccattgatgagtatcgagcgtaaaatgttccacatcacgcagattggcgtggtgctgctaacgctcacgctttgcactggcctgttctacatgcacaacttatttagcatggaaaatatcgacaaggctgtgctctctatcgtggcgtggtttgtctatattgtgctgctgtggggacattatcatgaaggatggcgtggacgccgcgtcgtctggtttaacgttgcgggcgcggtaattctgacactggcctacttcggcagccgaattgtccagcagttaatcagctaaacccagaaaaggagtttcccctggaacacatttctactactacgttgatcattattctgatcatcatggtggtcatttcagcctatttttccgggtccgaaaccggaatgatgaccctcaaccgctatcgtctgcgacatatggcgaaacagggtaatcgcagcgccaaacgcgtcgaaaaattgctgcgtaagccagaccgcctgataagcctggtgttaatcggcaataacctggtcaatattcttgcctccgcgctcggcactattgttgggatgcgtttgtacggcgatgcgggcgtggcaattgcgactggtgtgctgacttttgtcgtactggtatttgctgaggtattgccgaaaaccattgccgcgctgtacccggaaaaagtcgcttatccgagtagttttctgctggctccgctgcaaattttgatgatgccgctggtctggttgctgaatgctatcacccgtatgctgatgcgcatgatgggtatcaaaaccgatatcgtggttagcggctctttgagcaaagaagagttgcgcactatcgtgcacgaaagtcgcagtcaaatttcccgtcgcaatcaggatatgctgctgagcgtgctcgatctggaaaaaatgaccgttgatgacatcatggtgccgcgcagtgaaattatcggtattgatatcaacgatgactggaaaagcattctgcgccaactctcccacagtcctcacgggcgcatcgtgctctaccgtgatagcctggacgacgccatcagtatgctgcgagtacgtgaagcctggcggttgatgagcgagaaaaaagagttcaccaaagaaaccatgctgcgcgccgcggacgagatctattttgtgccggaaggtacgccgctcagcacgcagttggtaaagtttcagcgcaacaaaaagaaagtcggcctggtcgtcaacgagtatggagacattcaggggctggtgacggttgaagatattctggaagagattgtcggcgatttcactacgagcatgagcccaacacttgccgaagaggtcacgccgcaaaacgacggtagcgtgattatcgatggcaccgccaacgtgcgggaaatcaacaaagcctttaactggcatctaccggaagatgatgcccgcacggttaatggcgtcattcttgaggcactggaagagatccctgtcgcaggcacccgcgtgcgtattggcgagtacgatatcgatattctcgacgtacaggacaatatgattaagcaggtaaaagtttttcctgtgaaaccgctgcgcgagagtgtggcggagtaacgaaaacggcccggcattcgcatgcagggccgtgaattattacgaaagcagaaattaagcttttgctttcgctacagtaaccatcgccgcacgaatcgtacgaccattcagcgtataacccttctgcataatgcccagtacgttacctggcgcaacgtcatcagattccaccattgcgatggcctgatgcacattcgggtccagtgggacgttagtttcggcgatcacttcaacgccaaacttacgcacaacatccagcatgctcttcagcgtcagctcaatgccttcaaccatcgcagacatatccgggttagctttatcagccacttccagcgcacgatccaggctatcaatcaccggcagcaattcgttgatgaatttctccagcgcgaatttgtgggctttttcaatatccagttcagtacgacgacgcaggttttccatttcggcttttacacgcaaaatgccgtcacgttcacgggtctgggcttcagccagctgagcttcgagattcgcaactttttcatcgcgcggatccacctgctcagcagaagcttctggctcaactgcctcaatctcttcgtgctgatccatgataatttcttccggggcttgcccctcaggcgttttctgttctttactactcatgaatttctccgcgtttttttcgcattcatctcgctaacttcgcttattatggggatcagtttcagggtttcaagggaagcactcacattgtcatcaatcttcgcaacaaggacctcggaaaaatgaataatcatttcaagtgtattggcattgtgggacacccacggcaccccactgcactgacaacacatgaaatgctctaccgctggctgtgcacaaaaggttacgaggtcatcgttgagcaacaaatcgctcacgaactgcaactgaagaatgtgaaaactggcacgctcgcggagattgggcaactagctgatctcgcggtagtcgttggtggcgacggtaatatgctgggcgcggcacgcacactcgcccgttacgatattaaagttattggaatcaaccgtggcaacctgggtttcctgactgaccttgaccccgataacgcccagcaacagttagccgatgtgctggaaggccactacatcagcgagaaacgttttttgctggaagcgcaagtctgtcagcaagattgccagaaacgcatcagcaccgcgataaatgaagtggtgcttcatccaggcaaagtggcgcatatgattgagttcgaagtgtatatcgacgagatctttgcgttttctcagcgatctgatggactaattattagcacgccaacaggctccaccgcctattccctctctgcaggcggtcctattctgaccccctctctggatgcgattaccctggtgcccatgttcccgcatacgttgagtgcacgaccactggtcataaacagcagcagcacgatccgtctgcgttttagccatcgccgtaacgacctggaaatcagttgcgacagccagatagcactgccgattcaggaaggtgaagatgtcctgattcgtcgctgtgattaccatctgaatctgattcatccgaaagattacagttatttcaacacattaagcaccaagctcggctggagtaaaaaattattctaattttacgccagcctctttactgtatataaaaccagtttatactgtacacaataacagtaatggtttttcatacaggaaaacgactatgttggcacaactgaccatcagcaactttgctatcgttcgtgagcttgagattgattttcatagcggcatgaccgtaataactggcgagaccggcgcgggtaaatctattgcaatagatgccctcggtctttgtctcggtggtcgcgctgaagccgacatggtgcgtaccggcgctgctcgcgctgacctgtgcgcccgtttttctctgaaagatacgccagcggctctgcgctggctggaagaaaaccagcttgaagacgggcatgaatgtttgcttcgtcgcgtgatcagcagcgatggtcgctcccgtggtttcatcaacggtacagctgttcctctgagtcaactgcgcgaactgggtcagttgctgattcagatccatggtcagcacgctcatcaattactcaccaaacctgagcaccaaaaattcctgcttgatggctatgccaatgaaacctctctactgcaggaaatgaccgcacgttatcagttgtggcatcaaagctgccgtgacctcgcgcatcatcaacagttaagtcaggaacgcgccgcccgtgcggaactgctgcaataccaattaaaagaacttaacgaatttaatccgcagcccggagagtttgaacaaatcgacgaagagtacaaacgtctggcgaacagcggtcaattgctgaccaccagccagaatgcattggcattaatggccgacggtgaagacgcaaacctgcaaagtcagctttacacggctaaacaactggtgagcgaattgattggcatggacagcaaactgtccggcgtacttgatatgctggaagaagctaccatccagattgctgaagccagcgatgaactgcgccactactgcgatcgtctggatctcgatcccaaccgactatttgaacttgaacagcgcatcagtaaacagattagcctggcacgtaaacatcacgtcagccctgaggcattgccacagtattaccagagcctactggaagaacagcagcaactggacgatcaggccgacagtcaagaaacgcttgcgctggcggtaacgaaacatcatcagcaggcactggaaatcgcgcgcgcattacaccaacaacgccagcaatatgcagaagaacttgcacagctgatcaccgacagtatgcatgcgctcagtatgccgcatgggcagtttacgatcgatgttaaatttgacgagcatcacctgggcgctgacggtgccgatcgtattgagtttcgggtaaccaccaacccaggtcagccaatgcagcctattgccaaagtcgcatccggtggtgaattgtcccgcatcgcactggcaatccaggtcatcacggcgcgtaaaatggaaaccccggcactgatttttgatgaagtggatgtagggattagcggtccaacagcggcagttgtcggcaaactgctgcgtcaactcggcgaaagtactcaggtgatgtgtgttacccacctgccacaagtcgcgggatgtggtcatcaacactattttgtcagcaaagaaaccgatggtgcgatgacagaaacgcatatgcaatccctgaataaaaaagcgcggttacaagagctggcgcgcctgcttggtggcagtgaagtcacacgtaatacactggcgaatgcgaaagaactgcttgcagcgtaaacttttttcctgcttcacggtcagagtaaacagcaaaacgccgtaagaccggaaagcaaaaggttttaaagtgatgaaaggtctattatcatcggcatattacagatgagccacgtactgctcgggcccgaaaaggaatcaaatcactatgcgctgtaaaacgctgactgctgcagcagcagtactattgatgttgaccgcaggctgttccactctggagcgagtggtttaccgtcctgacatcaaccaggggaactatctgaccgctaacgacgtatccaaaatacgtgttggcatgacgcaacaacaagttgcgtacgcattgggtacaccgctgatgtccgatccatttggtacgaatacctggttctatgtcttccgccagcaaccaggtcatgaaggtgtaactcagcaaacgctgacgctgacctttaacagtagcggtgtgttgaccaatattgataacaaacctgcgctgagtggtaactaataataaagttgctctcaaagacgttaaaaaaggtgctcaatgagcaccttttttctgtctgttatttattcgcacttttttctgctcgttgcctgcgaagctctttcggatcggcaatgagagggcgataaatctccacccgatcgccatcatgcacactatcgcttagttttgccggacggctgtaaatgccgactttgtttttagttaaatcgatatcggtacgcaattccagcaagccactggcgcgaatagcttcttcaaccgtcgcgccctcctgcagcgtcactcgctgcaggtactgcttctcaggtagcgcataagccacctcaacggcaattttacctggcactgtaaacctctttcgcacgaaccgtaaaagcctggaccatattagccgccagctctttaaacacgcgaccaaaggcgagttcaatcaacttattggtaaactcaaagtcgagatgaaactcgatacgacacgcctcctggctcagcggcgtaaacttccatccaccaatcaatttcttgaacggcccatccaccagattcataagaatactttggttactggtcaactggttgcgggtagtaaacgttttgctgatcccagccttagagacatctaccgccgcagtcatctgcccaggagtggactccagaatccgacttccggtacaacccggcaaaaactgaggataagactgaacgtcattcactaactgatacatttgctccgcgctgtagggtaccagtgcggtccggctaatctgaggcataacaatttccatcaacaaaaatccaacaaataatatcatttatcctgctgtaaaaaaaacgctatcccggcgctgggtaacatcgggttcatgctaagatagagccttgtcccccgcaggattgatatggggtgttttcgatttcagattaccgatgattcacgacgcttatgacgaagaaaaaagcacataaacctggtagtgcgaccatcgcgcttaacaagcgcgcccgtcacgaatactttatcgaagaagagttcgaagcgggacttgccctgcaaggctgggaagttaaatccctgcgcgcaggaaaagccaatatcagcgacagctacgtccttctgcgtgacggagaggcatttctgtttggcgctaacatcacgccaatggccgtggcctccacgcatgtggtgtgcgatcctacccgtacccgcaagttacttctcaaccagcgcgaactggacagtttgtacggtcgcgtcaatcgagaaggctataccgtagtggcgctctccctgtactggaaaaatgcctggtgcaaagtgaaaatcggcgtcgccaaaggtaagaaacagcacgataaacgtagtgatatcaaagagcgcgaatggcaggtggataaagcacgtatcatgaaaaacgcccaccgttaaacctgcactccaattattgaccagttcctcaccgcgcctccctctccggcggcgcgaatgaacatcttattggctatcacatccgacacaaatgttgccatcccattgcttaatcgaataaaaatcaggctacatgggtgctaaatctttaacgataacgccattgaggctggtcatggcgctcataaatctggtatacttacctttacacattggggctgattctggattcgacgggatttgcgaaacccaaggtgcatgccgaggggcggttggcctcgtaaaaagccgcaaaaaatagtcgcaaacgacgaaaactacgctttagcagcttaataacctgcttagagccctctctccctagcctccgctcttaggacggggatcaagagaggtcaaacccaaaagagatcgcgtggaagccctgcctggggttgaagcgttaaaacttaatcaggctagtttgttagtggcgtgtccgtccgcagctggcaagcgaatgtaaagactgactaagcatgtagtaccgaggatgtaggaatttcggacgcgggttcaactcccgccagctccaccaaaattctccatcggtgattaccagagtcatccgatgaagtcctaagagcccgcacggcgcaagccctgcgggcttttttgtgccctcaatttgtcccgcgaagtccgaagagaactaattaaatccgaaccttttaggcccattgataggcccaacgaaaagctctattgtttacgttgggctaaacgcagggagactccccacctttgaaaacaggatgtagcgatgaaacttaacgacagtaacttattccgccagcaggcgttgattaacggggaatggctggacgccaacaatggtgaagccatcgacgtcaccaatccggcgaacggcgacaagctgggtagcgtgccgaaaatgggcgcggatgaaacccgcgccgctatcgacgccgccaaccgcgccctgcccgcctggcgcgcgctcaccgccaaagaacgcgccaccattctgcgcaactggttcaatttgatgatggagcatcaggacgatttagcgcgcctgatgaccctcgaacagggtaaaccactggccgaagcgaaaggcgaaatcagctacgccgcctcctttattgagtggtttgccgaagaaggcaaacgcatttatggcgacaccattcctggtcatcaggccgataaacgcctgattgttatcaagcagccgattggcgtcaccgcggctatcacgccgtggaacttcccggcggcgatgattacccgcaaagccggtccggcgctggcagcaggctgcaccatggtgctgaagcccgccagtcagacgccgttctctgcgctggcgctggcggagctggcgatccgcgcgggcgttccggctggggtatttaacgtggtcaccggtagcgcgggcgcggtcggtaacgaactgaccagtaacccgctggtgcgcaaactgagctttaccggtagcaccgaaattggccgccagttaatggaacagtgcgcgaaagacatcaagaaagtgagcctggagctgggcggtaacgcgccgtttatcgtctttgacgatgccgacctcgacaaagccgtggaaggcgcgctggccagcaaattccgcaacgccgggcaaacctgcgtctgcgccaaccgcctgtatgtgcaggacggcgtgtatgaccgttttgccgaaaaattgcagcaggcagtgagcaaactgcacatcggcgacgggctggataacggcgtcaccatcgggccgctgatcgatgaaaaagcggtagcaaaagtggaagagcatattgccgatgcgctggagaaaggcgcgcgcgtggtttgcggcggtaaagcgcacgaacgcggcggcaacttcttccagccgaccattctggtggacgttccggccaacgccaaagtgagcaaagaagagacgttcggccccctcgccccgctgttccgctttaaagatgaagctgatgtgattgcgcaagccaatgacaccgagtttggccttgccgcctatttctacgcccgtgatttaagccgcgtcttccgcgtgggcgaagcgctggagtacggcatcgtcggcatcaataccggcattatttccaatgaagtggccccgttcggcggcatcaaagccagcggtctgggtcgtgaaggtagcaagtatggcatcgaagattacttagaaatcaaatatatgtgcatcggtctttaactggagaatgcgaatgaacagcaataaagagttaatgcagcgccgcagtcaggcgattccccgtggcgttgggcaaattcacccgattttcgctgaccgcgcggaaaactgccgggtgtgggacgttgaaggccgtgagtatcttgatttcgcgggcgggattgcggtgctcaataccgggcacctgcatccgaaggtggtggccgcggtggaagcgcagttgaaaaaactgagccacacctgcttccaggtgctggcttacgagccgtatctggagctgtgcgagattatgaatcagaaggtgccgggcgatttcgccaagaaaacgctgctggttacgaccggttccgaagcggtggaaaacgcggtaaaaatcgcccgcgccgccaccaaacgtagcggcaccatcgcttttagcggcgcgtatcacgggcgcacgcattacacgctggcgctgaccggcaaggtgaatccgtactctgcgggcatggggctgatgccgggtcatgtttatcgcgcgctttatccttgcccgctgcacggcataagcgaggatgacgctatcgccagcatccaccggatcttcaaaaatgatgccgcgccggaagatatcgccgccatcgtgattgagccggttcagggcgaaggcggtttctacgccagcagcccagcctttatgcagcgtttacgcgctctgtgtgacgagcacgggatcatgctgattgccgatgaagtgcagagcggcgcggggcgtaccggcacgctgtttgcgatggagcagatgggcgttgcgccggatcttaccacctttgcgaaaagcatcgcgggcggcttcccgctggcgggcgtcaccgggcgcgcggaagtaatggatgccgtcgctccaggcggtctgggcggcacctatgcgggtaacccgattgcctgcgtggctgcgctggaagtgttgaaggtgtttgagcaggaaaatctgctgcaaaaagccaacgatctggggcagaagttgaaagacggattgctggcgatagccgaaaaacacccggagatcggcgacgtacgcgggctgggggcgatgatcgccattgagctgtttgaagacggcgatcacaacaagccggacgccaaactcaccgccgagatcgtggctcgcgcccgcgataaaggcctgattcttctctcctgcggcccgtattacaacgtgctgcgcatccttgtaccgctcaccattgaagacgctcagatccgtcagggtctggagatcatcagccagtgttttgatgaggcgaagcagtaacgccgctcctatgccggaggcgacgctgcgcgtcttgtccggcctacggggatccaggtcggataaggcgtttacgccgcatccgacaatctgtacgtgaacaggaagaaatctatgttggccgggtaaggcggagccgctctccggcaaaaagaatcaataacaattatacgcgtgacccggcgcgggaaatgtcggggcgctctcccaagtgacacactttcgagaggattcaggatggggcaaagtagccaaccacatgagttaggcggcgggctgaagagtcgccacgtcaccatgttgtctattgccggtgttatcggcgcaagtctgtttgtcggttccagcgtcgccatcgccgaagcgggcccggcggtattactggcctatctgttcgccgggctactggtggttatgattatgcggatgttggcggaaatggcggttgccacgcccgataccggtagcttttccacctatgccgataaagccattggtcgctgggcgggctataccatcggctggttgtactggtggttttgggtactggttatcccgctggaagccaacatcgccgccatgatcctgcacagttgggttccaggcattcccatctggttattttccctcgtcattaccctcgccttaactggcagtaacttattaagcgttaaaaactacggcgaatttgagttctggctggcgctgtgcaaagtcatcgctatcctggcctttattttccttggtgcagtcgcaattagcggtttttacccgtatgccgaagtgagcgggatcagtagattgtgggatagcggcggctttatgcccaacggtttcggtgcggtattaagcgcgatgttgatcaccatgttcagctttatgggcgcagaaattgtcaccattgccgccgcggaatccgacacgccggaaaaacatattgtccgcgccaccaacagcgttatctggcgtatttctatcttctatttatgttctatttttgtcgtcgtggcattaattccgtggaatatgcccggactaaaagccgtcggttcttatcgcagcgtactggaattgctcaatattccccatgcgaaattaatcatggactgcgtgatattactttccgtaaccagttgcctgaacagcgcgctgtataccgcgagtaggatgctctactccttaagtcgtcgcggtgatgctcccgcggtaatgggtaaaatcaaccgcagtaaaaccccgtacgtggcggtgttactctccaccggcgcggcattcttaacggtggtggtgaactattacgcgcctgcgaaggtatttaaatttctgatcgacagctccggcgctatcgccctgctggtttatttagtcatcgccgttagtcagttgcggatgcgcaaaattctgcgagcagaaggaagcgaaattcgcttgcgaatgtggctttatccgtggctcacctggctagtcatcggctttattacctttgtgttggtagtgatgctattccgtccggcgcaacagttagaagtgatctccaccggcttattagcgatagggattatctgtaccgtgccaattatggctcgctggaaaaagctggtattgtggcaaaaaacacccgttcataatacgcgctgatcatgatcaggagtcacaccatgaccattacgtctctggatggctatcgctggctgaagaacgatattattcgcggtaattttcaaccggatgaaaaattacgaatgagtttgctgacaagccgttatgcacttggcgttgggccgttacgggaagctcttagccaactggtggcggaacggctggtcacggtggtgaatcaaaaagggtatcgggtggcgtctatgagtgagcaggagctgctcgatattttcgacgcccgcgccaatatggaagcgatgttagtgagtctggcgattgcccgcggtggcgatgagtgggaggcagacgttctcgcaaaagcgcatctgctgagtaagcttgaggcctgtgacgccagcgagaaaatgcttgatgagtgggatctgcgtcatcaggcgtttcatacggcaattgtggcgggctgtggttctcactatttgctgcaaatgcgtgaacggttgtttgatctggcggcgcgttatcgatttatctggctgcggcgaacggtgcttagcgtggaaatgctggaggataaacacgatcagcaccagaccctgactgcggcggtactggcgcgagataccgcgcgcgccagtgagttaatgcgccagcatttactgacgccaattcccattatccagcaggcgatggctggcaattaattactcttccggaatacgcaacacttgccccggataaattttatccgggctttttagcatcggtttattcgcttcgaagattttattgtacagattagcgttaccgtagacctgtttggaaatggcactcagagtgtcgccagacttaacggtataaaactggctggcagtggctggtgtcgccgttttcacctgatcatcgacactggcaataccggaaatattccccaccgcaacaaggattttctccttcgcctcctgactcaggccgtcaccagtgaccgtcgctttgccgtcggcaatttgaatattcactttatcggcatccggtataccggttttgttcagatgctcctgcaccttcttcgcctgatcgtctttatcgtgctgacctgtaaccgcgtcccagagtttttctccggcatctttcacaaaattgaacagacccatagctacctcattcgttaacggaaacactcagaaagtgtagcagaggaacgcggcgcgttaacgccgcggggatgagcacaggtttaatcgcgggtttgcacccagaacgcgtgaatcaaaccggggatatacccaagcagtgtcaacagaatattaataatgaacgcccaaccgaaccctttaccgagcagcacgccgagcggcggcagaatgatggtgatgacgattctccagaaacccatatgtactccctataagaaaattactcattgtttaaaaagagattttatctcttaagcgtagtaattttagcggagcctgccagtttcagcttacgcttttactctcatttacgctgctgaggctggtatatgttgcatttttagtttagagtttacttaatttagaaaatacttaaataaatatgactgaactcgcgcaattacaggccagtgccgaacaggcagcggccttattgaaagcaatgagccaccctaaacgattgctgattctgtgcatgcttagcggttcccccggcaccagcgcgggagagctgacgcgcattaccggactgagtgcctctgcgacaagtcagcatctcgctcgtatgcgggacgaagggcttatcgacagccaacgggatgcccaacgcattctatattccattaaaaatgaggcggtaaatgccattatcgccaccctgaaaaatgtctattgtccgtaaggagtcactatggctttgacaaccattagcccgcatgatgcacaagaattaatcgcacgcggcgcaaagttaatcgatattcgtgatgctgatgaatatcttcgtgaacatattcctgaagcagatctggctccattatccgtgctggaacagagtggtcttccggctaaattacgtcacgagcaaattatattccactgccaggcaggtaaacgcaccagtaataatgccgataaattagcagcgattgccgcccccgcagaaatctttttactcgaagatgggattgatggctggaaaaaagcaggattgccagtagcggtaaataaatctcaacccttgccgttaatgcgccaggtgcagatcgctgcgggtggtttaatattaatcggcgttgtactgggttataccgtaaatagcggtttcttcttattaagtggctttgttggtgccgggttactgtttgcaggaatcagcggtttttgtggaatggcaaggttgttagataagatgccgtggaaccaacgagcttgagaagcgacgccggacgcgccctagcagcgacatccggcctcagtaattagatcaggaaatcgtcgagagatttaccttctgccagcgcctgagcaattggcttcggtgtacggccctgaccggtccaggttttagtttcaccgttaacatcggtgaatttatatttcgccggacgcggctggcgttttttaccagcgcgtggtgcagcagcagagctattacccaataactcttccgggttaattccgtcagctttcatcagctccagccaggtgctaattttttcctggcgctctgccagttcacgctgctgctgttcttcttcttcacgtctttctttagtgacaaccctgaatttttcgagcatttcttcaagaacgtcaatggagaattcgcgagccatcgcacggagggtgcgaatgttatttaaactttgtaacattacggacataataaagaaaaccttttaacgccaaaacaaaaaaagtatttcgtcgcgtagtgtaagcgatcacttattatatttccacaaaatttaatctatttacagtcctgcgcgagattatttcagctgttattttctgaaactctcagaataatttcaagattatatattagccattttgatgagtaatttagattattggtgaacagagcggcgctctctgctcgctaattccgcaagcctgacaaaatcaaagtgaataaaaatgcaatataacagaataaaagaaaacatccatcactggtgctttctgctgttaatgtacattgtctggcataaaaaatgctgaaaatgacccagctactacatacaccgaattctctacgcttatagcgttacctcacccccaaactttcattagtgatattaaaggtaaggccatatctaattgatttaattaaaaataaatcatatcggcatgtaaaaatccacaatgtacaaaaaacgagccgttacggaatattttatctacaaaaactgactaaataaaaatttttcactaattgattagtcatagccagcgatatacgctatgcgaaaatgcagatggcaatgagatccactgctttcatctccattaacatcccattacgcttttattaaggagcattagcatgttcagtccgcagagtcgcttgcgtcatgcagttgcagatacgttcgcgatggttgtttactgttctgtcgtgaacatgtgtattgaagttttcctctccggaatgagcttcgaacagtctttttattccagattggtagcgattccggtgaacatcttaattgcatggccatacggtatgtaccgtgatctgtttatgcgcgcggcacgcaaagttagcccgagcggctggataaaaaatctggcggatatcctggcttatgtgacgttccagagtccggtgtatgtggcgatcttgttagtggtgggcgcagactggcatcagattatggcggcggtcagtagtaacatcgttgttagcatgttgatgggggcggtttatggctacttcctcgattattgccgccgactgtttaaagtcagccgttaccagcaggtaaaagcctgactcttcttttcgcgactggcatcgccagtcgcgtctttaactggcttcgccaaataaaccattcaaataacgttcaagcgcaacacggctactaaagccatgcgggataccgtaatgctcgtgtcgctcgcctgctaaatagagcggaaattgctggtaatgatcgcaagttttaatatcggaagcgggttcagccagtgtgctactgcgttcttttaatgttggatgaattaccagagcggtacgtcccattcgcgcttcgcgattaacatagacataattttccccacggcggtaaccatacgctttctgggttaccacatcgacagtaaaaccgactttttcaagtacgcgcgccacctcgtctggtcgtaaatacatatttgatcctcgttattatcaaccgcgggcctaccttacctgattgcgcattcacaacgctttcagaaaagtccataaagccgcgatgaacctcagttaagaaaattatggtctacactgaaaattacatcgaattctaatgggggatcatatgtttaaccgaccgaaccgcaacgacgttgatgatggcgtgcaggatatccagaatgatgtcaatcaattagctgacagcctcgaatctgtattgaagtcctggggcagcgacgccaaaggggaagctgaagccgcacgcagtaaagctcaggcattgctgaaagaaaccagggcgcgaatgcatggtcgtactcgcgtccagcaagccgcgcgcgatgccgttggctgcgcggattcttttgttcgtgaaagaccctggtgtagcgtgggtacagcagctgcggtaggtatttttatcggcgcactgttaagcatgcgcaaaagctaatgcaaaaatgataataaatacgcgtctttgaccccgaagcctgtcttcggggtttctttttgcctggtgaatcacaaaaatccccctaccccgtcacgctcatatccagggtaatttcgaccactatttgctatatattgtgtggttgaatcttttttcaactacatctagtatctctgtatcaacagagagacaacccgacgcgtatcatcgcgccgtatcttcattttaaacggaaatacgaatcatgcgcattactatttacactcgtaacgattgcgttcagtgccacgccaccaaacgggcgatggaaaaccggggctttgattttgaaatgattaatgtcgatcgcgttcctgaagcggcagaagcgttgcgtgctcagggctttcgtcagttgccggtagtgattgctggcgatcttagctggtctggtttccgtccggacatgattaaccgtctgcatccagcgccacacgcggccagtgcatgagccagctcgtctacttctccagcagctccgaaaacacgcagcgttttatcgaacgtttaggtctgcccgcggtgcgcatcccgctcaatgagcgggaacggattcaggtagacgagccttacatcctgatcgtgccctcttacggcggcggcggtacggctggcgcggtgccacgacaggtaattcgctttttaaacgacgagcacaaccgggcgttgcttcgcggcgttattgcttctggtaatcgcaactttggtgaggcgtatggccgcgccggagatgtgattgcccggaaatgcggcgtgccgtggctgtaccgttttgaactcatgggtacgcaaagcgatatcgaaaacgttcgtaaaggagtaaccgaattttggcaacgacaaccgcagaatgcctgacgcaggaaacgatggattaccacgcgctgaatgcgatgcttaacctctacgatagcgcaggtcgcattcagttcgataaagaccgccaggccgttgacgcctttattgcgacgcatgtgcgtccgaacagtgtgaccttcagtagccagcagcagcgcctgaactggctggtcaacgaaggttactatgatgaaagcgttcttaatcgctactctcgcgactttgtcattacgctgtttacccacgcacacaccagcggttttcgtttccagacattcctcggggcatggaagttttacaccagctatacgttgaagacattcgacggtaaacgttatctggaagattttgccgatcgagtaacgatggtggcgctgacgctggcacaaggcgatgagacgctggcgttgcaactgaccgatgaaatgctgagtggacgctttcagccagccacgccaacattcctcaactgcggtaagcagcagcgcggcgaactggtttcctgttttttgctgcgtattgaagacaatatggagagcattggtcgggcggtaaattccgcactgcagctgagcaaacgcggcggcggcgtagcatttttgctgagcaatctgcgagaagcgggcgcgccaattaaacgtattgaaaatcaatcttctggcgtaattccggtgatgaaaatgctggaagacgcattttcctatgccaaccaactcggcgctcgtcagggggctggtgcagtctatttacatgctcatcatcccgatattctgcgttttctcgacacgaaacgggaaaatgccgacgaaaaaatccgcattaaaacactgagccttggcgtggtgatcccggatatcactttccatctggcaaaagagaatgcgcagatggcgctgtttagcccttatgacgtagagcgagtttatggcaagccgtttgccgatgtggccatcagccaacactatgacgaactggttgccgatgaacgcattcgcaaaaaatacctcaacgcccgtgatttcttccagcgactggcagaaatccagtttgagtccggctatccctacatcatgtatgaagacacggtaaaccgtgctaaccctatcgccgggcgcataaatatgagtaatctctgcagtgaaattttgcaggttaacagcgccagtgagtatgacgagaatctcgactatacccgcacaggccatgatatttcctgcaatttaggtagcttgaatattgcgcacaccatggattcccccgattttgcccgcacggtagagactgccgtgcgcggtttaacggcagtaagtgatatgagtcatatccgcagcgtgccgtccatcgaagccggaaatgccgccagccacgccatcggactggggcagatgaatttacacggctatctggcgcgagaaggcatcgcttatggtagcccggaagcactggatttcaccaatctctatttctatgccatcacctggcatgcactgcgtaccagcatgttgctggcacgcgaacgcggtgaaaccttcgccgggttcaaacagagtcgctatgccagtggtgaatattttagccaatatctgcaagggaactggcagccgaaaacggcgaaagttggcgaactgtttacccgtagcggtattacgttacctacccgtgagatgtgggcgcagctgcgcgacgacgtgatgcgctacggcatatacaaccagaatcttcaggcggtgccgccaaccggttctatctcttatatcaaccatgctacgagcagtattcatccgattgtggcgaaagtagagatacgcaaagagggcaaaacaggacgcgtttactaccctgccccgtttatgactaacgagaatctggcgctgtatcaggacgcttacgaaattggcgcagaaaagatcatcgacacctacgcggaagcgactcgccatgtcgatcaggggctgagcctgacgctttttttccccgataccgccaccactcgcgatatcaacaaagcgcagatttacgcctggcgcaagggtatcaaaacgctctattacatccgcctgcgtcagatggcgctggaaggcactgaaattgaaggctgcgtctcctgtgcactttaaggaatatctatgaaactcagtcgtatcagcgccatcaactggaacaagatatctgacgataaagatctggaggtgtggaatcgcctgaccagcaatttctggctaccagaaaaggtgccgctgagcaacgatattcctgcctggcagacattaactgtcgtagaacaacaactgacgatgcgcgtttttactggcctgacgctgctcgacacgctgcaaaatgttatcggcgcgccttctctgatgcccgatgcactcacgcctcatgaagaagcggtattaagcaatatcagctttatggaagcggttcatgcccgctcttacagtagcattttcagcacgctatgccagaccaaagatgtcgatgccgcctacgcctggagtgaagaaaacgcaccgttgcagcgaaaagctcagattattcagcaacattatcgcggtgatgatccgctgaaaaagaaaatcgccagtgtgtttcttgaatcttttttgttctattccggtttctggctgccgatgtatttttccagccgcggaaagctgaccaataccgcggacctgatccgtctgattatccgcgatgaagcagtccacggttactacataggctataaatatcagaaaaacatggaaaagatatctctgggacaacgtgaagagttgaagagtttcgccttcgatttgttgctggaactctacgacaacgagttgcaatacaccgatgagctgtacgccgaaaccccgtgggctgacgatgtgaaagcgtttctctgttacaacgccaataaggctttgatgaatctgggctacgaaccgttatttcccgcagaaatggcggaagtgaatccggcaatcctcgccgcgcttagcccgaatgccgatgaaaatcacgatttcttttccggtagtggctcctcttatgtgatggggaaagcggttgaaacagaagatgaagactggaatttctgagggtgttattttcaaaaatatcactacccgcagcagggaaataattcccgccaaatagctttttatcacgcaaataatttgtggtgatctacactgatactctgttgcattattcgcctgaaaccacaatattcaggcgttttttcgctatctttgacaaaaaatatcaactttctcgatttgctctcagcccttatatcacgggaaattccggcgatttgctcgcatcaatattcatgccacatttgccatcaggggttgcctcagattctcagtatgttagggtagaaaaaagtgactatttccattgggtaatatatcgacatagacaaataaaggaatctttctattgcatggcaattaaattagaaattaaaaatctttataaaatatttggcgagcatccacagcgagcgttcaaatatatcgaacaaggacttagtaaagaacaaattctggaaaaaactgggctaagccttggcgtaaaagacgccagtctggccattgaagaaggcgagatatttgtcatcatgggattatccggcagcggtaaatccacaatggtacgccttctcaatcgcctgattgaacccacccgcgggcaagtgctgattgatggtgtggatattgccaaaatatccgacgccgaactccgtgaggtgcgcagaaaaaagattgcgatggtcttccagtcctttgccttaatgccgcatatgaccgtgctggacaatactgcgttcggtatggaattggccggaattaatgccgaagaacgccgggaaaaagcccttgatgcactgcgtcaggtcgggctggaaaattatgcccacagctacccggatgaactctctggcgggatgcgtcaacgtgtgggattagcccgcgcgttagcgattaatccggatatattattaatggacgaagccttcagcgcgctcgatccattaattcgcaccgagatgcaggatgagctggtaaaattacaggcgaaacatcagcgcaccattgtctttatttcccacgatcttgatgaagccatgcgtattggcgaccgaattgccattatgcaaaatggtgaagtggtacaggtcggcacaccggatgaaattctcaataatccggcgaatgattatgtccgtaccttcttccgtggcgttgatattagtcaggtattcagtgcgaaagatattgcccgccggacaccgaatggcttaattcgtaaaacccctggcttcggcccacgtagcgcactgaaattattgcaggatgaagatcgcgaatatggctacgttatcgaacgcggtaataagtttgtcggcgcagtctccatcgatagccttaaaaccgcgttaacgcagcagcaaggtcttgatgcggcgctgattgatgcgccgttagcagtcgatgcacaaacgcctcttagcgagttgctctctcatgtcggacaggcaccctgtgcggtgcccgtggtcgacgaggaccaacagtatgtcggcatcattagcaaaggaatgctgctgcgcgctttagatcgtgagggggtaaataatggctgatcaaaataatccgtgggataccacgccagcggcggacagtgccgcgcaatccgcagacgcctggggtacaccgacgactgcaccgactgacggcggtggtgctgactggctgaccagtacgcctgcgccaaacgtcgagcattttaatattctcgatccgttccataaaacgctgatcccgctcgacagttgggtcactgaagggatcgactgggtcgttacccatttccgtcccgtcttccagggcgtgcgcgttccggttgattatatcctcaacggtttccagcaattgctgctgggtatgcccgcaccggtggcgattatcgttttcgctctcatcgcctggcagatttccggggtcggaatgggtgtggcgacgctggttagcctgattgccatcggcgcaatcggtgcctggagccaggcaatggtgactctggcgctggtgttaaccgccctgctgttctgtatcgtcatcggtttgccgttggggatatggctggcgagaagtccgcgagcggcgaaaattattcgtccactgcttgatgccatgcagaccacgccagcgtttgtttatctggtgccaatcgtcatgctatttggtatcggtaacgtgccgggcgtggtggtgacgatcatctttgctctgccgccgattatccgtctgaccattctggggattaaccaggttccggcggatctgattgaagccagccgcagtttcggtgccagcccgcgccagatgctgttcaaagttcagttaccgctggcgatgccgaccattatggcgggcgttaaccagacgctgatgctggccctttctatggtggtcatcgccagcatgattgccgtcggcgggttgggtcagatggtacttcgcggtatcggtcgtctggatatggggcttgccaccgttggcggcgtcgggattgtgatcctcgccattatcctcgatcgtctgacgcaggccgttgggcgcgacagtcgcagtcgcggcaaccgtcgctggtacaccactggccctgttggtctgctgacccgcccattcattaagtaactctgcacttgcccggtgacgccgggcattatcaccctgccaaaaaaaggaataacaatgcgacatagcgtactttttgcgacagcgtttgccacgcttatctctacacaaacttttgctgccgatctgccgggcaaaggcattactgttaatccagttcagagcaccatcactgaagaaaccttccagacgctgctggtcagtcgtgcgctggagaaattaggttataccgtcaacaaacccagcgaagtagattacaacgttggctacaccagccttgcttccggcgatgcaaccttcaccgccgtgaactggacgccactgcatgacaacatgtacgaagctgccggtggcgataagaaattttatcgtgaaggggtatttgttaacggcgcggcacagggttacctgatcgataagaaaaccgccgaccagtacaaaatcaccaacatcgcacaactgaaagatccgaagatcgccaaactgttcgataccaacggcgacggaaaagcggatttaaccggttgtaaccctggctggggctgcgaaggtgcgatcaaccaccagcttgccgcgtatgaactgaccaacaccgtgacgcataatcaggggaactacgcagcgatgatggccgacaccatcagtcgctacaaagagggcaaaccggtgttttattacacctggacgccgtactgggtgagtaacgaactgaagccgggcaaagatgtcgtctggttgcaggtgccgttctccgcactgccgggcgataaaaacgccgataccaaactgccgaatggtgcgaattatggcttcccggtcagcaccatgcatatcgttgccaacaaagcctgggccgagaaaaacccggcagcagcgaaactgtttgccattatgcagttgccagtggcagatattaacgcccagaacgccattatgcatgacggcaaagccagtgaaggcgatattcagggacacgttgatggttggatcaaagcccaccagcagcagttcgatggctgggtgaatgaggcgctggcagcgcagaagtaatttttattcgggcggataaggcgtttttgccgcatccgccgttctgtgcacaatgcctgatgcgacgctggcgcgtcttatcatgcctacaaaccacatcgcacatttcaacaatctatctttcatcccatattcatcaacatccgctattattgatttccagcttaatcatcacctgatgaacaaaaataatgactaaacctaatcatgagcttagcccggcgctgatcgtgctgatgtctatcgccaccggtctggcggtagccagtaactattacgcccagccattgctcgacaccatcgcgcgtaacttttccctttccgccagtagcgcaggctttattgttaccgccgcgcagttgggctatgccgcaggtctactgtttcttgttcccctcggtgatatgtttgaacgccgccgcctgattgtcagcatgaccttactggcggcatgttgattaccgccagcagtcagtcgctggcgatgatgatcctcggtacggcattaaccggtttattcagtgtcgtggcacaaattctggttccgctggcagcgacgctggctagtccggataaacgcggcaaagtggttggcactattatgagcggtctgctgttggggatcttgctggcacggacagttgccggattgctggcgaatctcggcggctggcgcaccgtcttttgggttgctagcgtgttaatggcactgatggcgctggcattatggcgtggtctgccacaaatgaaaagtgaaacccacctcaactacccacagttgttgggttccgttttcagtatgtttatcagcgataaaattctgcgtacccgcgcgttgctgggctgcctgacctttgccaatttcagcattctctggaccagtatggcctttttgcttgccgctccaccttttaactacagcgatggtgtcattggtctgtttggacttgcgggagctgccggagcgttgggcgctcgtccggcgggcggttttgccgataagggcaaaagccaccacaccacaactttcggtctgctgctgctattacttagttggctggcgatctggtttggtcacacttccgtactggcgttgattatcggaatcctggtgctggatctcaccgtgcagggcgtgcatatcactaaccagacggtaatttatcggatacatcctgatgcgcgcaatcgcctgaccgcaggttacatgactagctactttattggcggtgccgccggtagcctaattagtgccagtgcctggcaacatggcggttgggctggcgtttgtctggctggcgcgacgattgccctggttaacttactggtctggtggcgaggttttcatcgtcaggaagccgcaaattaagcaatcagcaaccgttttcgtggctttacacttataagggtgttaagaagcccatcagtctgataaggttaagatattcattcagtctatttataatattaacaatcgttaagcgtacactctatggaaagccctactccacagcctgctcctggtagcgcgaccttcatggaaggatgcaaagacagtttaccgattgttattagttatattccggtggcctttgcgttcggtctgaatgcgacccgtctgggattctctcctctcgaaagcgtttttttctcctgcatcatttatgcaggcgcgagccagttcgtcattaccgcgatgctggcagccgggagtagtttgtggattgctgcactgaccgtcatggcaatggatgttcgccatgtgttgtatggcccgagtctgcgtagccgtattattcagcgtctgcaaaaaagcaaaaccgccctgtgggcgtttggcctgacggatgaggtttttgccgccgcaaccgcaaaactggtacgcaataatcgccgctggagcgagaactggatgatcggcattgccttcagtagttggagtagctgggtatttggtacggtaataggggcattctccggcagcggcttgctgcaaggttatcccgccgttgaagctgcattaggttttatgcttccggcactctttatgagtttcctgctcgcctctttccagcgcaaacaatctctttgcgttaccgcagcgttagttggtgcccttgcaggcgtaacgctattttctattcccgtcgccattctggcaggcattgtctgtggctgcctcactgcgttaatccaggcattctggcaaggagcgcccgatgagctatgaggttctgctgcttgggttactagttggcgtggcgaattattgcttccgctatttgccgctgcgcctgcgtgtgggtaatgcccgcccaaccaaacgtggcgcggtaggtattttgctcgacaccattggcatcgccagcatatgcgctctgctggttgtctctaccgcaccagaagtgatgcacgatacacgccgtttcgtgcccacgctggtcggcttcgcggtactgggtgccagtttctataaaacacgcagcattatcatcccaacactgcttagtgcgctggcctatgggctcgcctggaaagtgatggcgattatataacccacaagaatcatttttctaaaacaatacatttactttatttgtcactgtcgttactatatcggctgaaattaatgaggtcatacccaaatggatagtagctttacgcccattgaacaaatgctaaaatttcgcgccagccgccacgaagattttccttatcaggagatccttctgactcgtctttgcatgcacatgcaaagcaagctgctggagaaccgcaataaaatgctgaaggctcaggggattaacgagacgttgtttatggcgttgattacgctggagtctcaggaaaaccacagtattcagccttctgaattaagttgtgctcttggaagttcccgtaccaacgcgacgcgtattgccgatgaactggaaaaacgcggttggatcgaacgtcgtgaaagcgataacgatcgccgctgcctgcatctgcaattaacggaaaaaggtcacgagtttttgcgcgaggttttaccaccgcagcataactgcctgcatcaactctggtccgcgctcagcacaacagaaaaagatcagctcgagcaaatcacccgcaaattgctctcccgtctcgaccagatggaacaagacggtgtggttctcgaagcgatgagctaacgcgtcatctcgctcaaaaatccagatttataaaagaaaaaatgactggccagcatcgcaacatgctggcctttttggcaagcaggtcggctcagccgatgagttaagaagatcgtggagaacaatatgagcgcaaatgcggagactcaaaccccgcagcaaccggtaaagaagagcggcaaacgtaagcgtctgctcctccttctcaccttgctctttataattattgccgtagcgatagggatttattggtttttggtactgcgtcacttcgaagaaaccgatgacgcatacgtggcagggaatcaaattcaaattatgtctcaggtgtctggcagcgtgacgaaagtctgggccgataacaccgattttgtaaaagaaggcgacgtgctggtcactctcgacccgacagatgctcgccaggcgtttgaaaaagccaaaactgcactggcttccagcgttcgccaaacccaccagctgatgattaacagcaagcagttgcaggcgaatattgaggtgcagaaaatcgccctcgcgaaagcacaaagcgactacaaccgccgtgtgccgctgggcaatgccaacctgattggtcgcgaagagctgcaacacgcccgcgacgccgtcaccagtgcccaggcgcaactggacgtcgcgattcaacaatacaatgccaatcaggcgatgattctggggactaaactggaagatcagccagccgtgcaacaggctgccaccgaagtacgtaacgcctggctggcgctggagcgtactcgtattatcagtccgatgaccggttatgtctcccgccgcgcggtacagcctggggcgcaaattagcccaacgacgccgctgatggcggtcgttccagccaccaatatgtgggtggatgccaactttaaagagacgcagattgccaatatgcgtatcggtcagccggtcactatcaccacggatatttacggcgatgatgtgaaatacaccggtaaagtggttggtctggatatgggcacaggtagcgcgttcagtctgcttccagcgcaaaatgcgaccggtaactggatcaaagtcgttcagcgtctgcctgtgcgtatcgaactggaccagaaacagctggagcaatatccgctgcgtatcggtttgtccacgctggtgagcgtcaataccactaaccgtgacggtcaggtactggcaaataaagtacgttccactccggtagcggtaagcaccgcgcgtgaaatcagcctggcacctgtcaataaactgatcgacgatatcgtaaaagctaacgctggctaatccagaggtgcgtgtgatgcaacagcaaaaaccgctggaaggcgcgcaactggtcattatgacgattgcgctgagtctggcgacattcatgcaggtgctggactccaccattgctaacgtggcgatccccactatcgccgggaatctgggcagtagcctcagccagggaacgtgggtaatcacttctttcggggtggcgaatgccatcagcatcccgcttaccggctggctggcaaagcgcgtcggggaagtgaaactgttcctttggtccaccatcgcctttgctattgcgagctgggcgtgtggtgtctccagcagcctgaatatgctgatcttcttccgcgtgattcaggggattgtcgccgggccgttgatcccgcttagccaaagtctattgctgaataactacccgccagccaaacgcagcatcgcgctggcgttgtggagcatgacggtgattgtcgcgccaatttgcggcccgatcctcggcggttatatcagcgataattaccactggggctggatattcttcatcaacgtgccgattggcgtggcggtggtgttgatgacactgcaaactctgcgcggacgtgaaacccgcaccgaacggcggcggattgatgccgtggggctggcactgctggttattggtatcggcagcctgcagattatgctcgaccgcggtaaagagctggactggtttagtagtcaggaaattatcatccttaccgtggtggcggtggtggctatctgcttcctgattgtctgggagctgaccgacgataacccgatagtcgatctgagcttgtttaagagccgcaacttcaccatcggctgcttgtgtatcagcctcgcgtatatgctctacttcggcgctattgttctgctgccgcagttgttgcaggaggtctacggttacacggcgacctgggcaggtttggcctctgcgccggtagggattattccggtgatcctgagcccgattatcggccgcttcgcgcataaactggatatgcggcggctggtaaccttcagctttattatgtatgccgtctgcttctactggcgtgcctatacctttgaaccaggtatggattttggcgcgagcgcctggccgcagtttatccaggggtttgcggtggcctgcttctttatgccgctgaccaccattacgctgtctggtttgccaccggaacgactggcggcggcaagcagcctctctaactttacgcgaacgctggcggggtctatcggcacgagcataaccacgaccatgtggaccaaccgcgagagcatgcaccatgcgcagttgactgagagcgtaaacccgttcaacccgaatgcccaggcgatgtacagtcaactggaagggcttgggatgacgcaacagcaggcaagtggctggattgcccagcagatcaccaatcaggggctgattatttccgccaatgagatcttctggatgagtgccgggatattcctcgtcctgctggggctggtgtggtttgctaaaccgccatttggcgcaggtggcggcggaggcggtgcgcactaagtacaactaagccagttcatttgaactggcttttttcaattaattgtgaagatagtttactgattagatgtgcagttcctgcaacttctctttcggcagtgccagttcttcgttgctgttgatgcgtacgtcacgttccagaatgctacgcgcaatatcctgcgcttcctgcaagctgtgcatctggtaagtgccacactggtagacgttcagttccgggatctgattctgatcctgcactttcagcacgtcttccattgccgttttccaggcatcagcaacacgctgctcatctggcgtaccaatcagactcatataaaaaccggtgcggcagcccattgggctgatatcgataatctctacaccattaccgttaagatggttacgcataaaaccagcaaacaggtgctccagggtatggatccctctttctggcatcacttctttgttcggcacgcagaagcgcagatcgaacacggtgattgcgtcgccatgcggggtgttcattgttttcgccacccgaactgcaggcgcttccatccgggtatgatcgactgtgaagctatctaacaacggcatttagccacctccggtaatttttttaaaaattttctgaactctttcttcccaggcgagtctgagtatatgaaagacgcgcatttgttatcatcatccctgaattcagagatgaaattttggccactcacgagtggcctttttcttttctgtcaggcgtgtttttccagccacaccgcaaacggttcggtatcagcggcttccatttcctgctgacggcgttcagacgcctcgcgctcggctacaaaatcctcttcgcgcagaatttccagcggctcttcacgcagcagattacggtaggcttctgcaaatgctttgcctgttccgccaataccagtatcaatcatagaccttaagatacgggcagagaaagtcagatcgggattatcgaagcaggcaaccagttcatcacacactttctgatacgcttcgccgccgttaatactatccagcgtttgcgcgacgcgtttcagatcgcggaacagatctttacccacctgcggtaacgggaactgtgcggtttcgcagccgatacccagcgtcagacccggtttgcgaccttcgaggatcacccggttccagttaacgcgtgtacaggcaagttcgctactgctcatttccggtgcatcagccagcgcacaccagaccataaacaggtcgaggaatcgcacctgctgttcatctacaccaatcgggctgaacgggttgatgtccaggctacgcacttcaatatattcaatgccgccacgtaacagcgcatcagaagggctctcgccgctgcgggtaacgcgttttggacgaatcggcgcgtacagttcgttttcaatctgcaacacgttgctgttgatttgcagcctcttaccgtctttctcaataccaatcttcgcgtactcttcgcttggcgttttgattgcctgtttaaggcccgctacgtactcgtaaagatcgttgaaggtaataccaagattgctttggcttttattggtatagccgagatcgctcaaacgaagagaggtcgcatacggcaggtaatacataccgcactcggttttctcaaacggcaggctcgttggttttccttgcaggaaagaagaacaaatcgccggagatgcaccaaacagataaggaatgacccaaccgaaacgatagtaattgcggataacgcggaaatagcccgcagaaattttctctttggcatcagcgccgctgatatcaccgcacttcgcttgccagaatgccattggcaaagagaaattgtagtgcacgccggaaatggtttgcatcagcgcgccgtagcgatttttcagcccttcacgatacagcgttttaaagcgtccggtgttagaagtgccgtactgtgccagttcgatgtcctgaccttctgcgatgtagcatggcatacttaacggccacatccgctcatcgcccatattgcgcgccgtataacgatgcagatcgcgcataaaggtcagcatatgttcaatatcaccatccactggtgtaatgaattccagcaatgcttccgcaaaatcggtagtaatccatttgtgcgtcagtgcggaacctaatgcttcaggatgacctgttgttgccagtgtgccatcagcattaacacgcaaagtttcgcgctccagcccacgctgtatcccctttaacgcctgaggatgtttttccagccaggccagcgcctgacttacgtccgggatcaaattgacctcccgcctgtcaaaatcgttttaattagcataactgtaatggtgaccatatgtgcaggcctacaattagtgccaccacatcatgccctgaacggtcgctgctgcaactgcaacatagcgtaacgctttaccaaggcacaaaaaaaagattaccggtccccagctgatgcgcatccatcccgctaacagacacagtaaatcgccaaccacgggcatccagcttaataatagcgtgactgcaccatagcgtttcagccagccggtagctttctcttgccagcggcttgttttacgcaatggaaagaaacgcccaaggataacgttagttaaccctccaaggctattacccattgttgctgttaaaactaaaacccagggatgactgatcccggaaagcaacattgccaccagcacgacttcggagttgccgggtaatagtgtagcgctgagaaaactactggcaaacaagctgaaaaggcttaacgcttcactcacagcaagcgaacatccacggcgtccatgcctgctgcacgggccgcctgaataccgaaatcggcatcttcaaagaccacacactgcgtcggttgcacgcccatacgctgcgcgcacaacaaaaatgtgtctggcgcgggtttatggtgtttgacgtgatcggcagcgacgacggcgtcaaaataatggcgtaatcccaggtgcgccagcaatgcctcagcgatggcgctttcactccccgttcctacagccattgggcgacgaccatgccaacttttcaccacatcaacaagaggaagcggttcgacgctatccagcagcatacttcttactgcttctgttttttcacgcgctaacgcatgcgggtcgagatcggcctgattcagctcaataattgcctgagcaatacgccaggtggggcttccattaagcgcaatcatcgcctgaatatcgtactgaagaccgtagtgccctaatacttcgcgccacgctttacggtgcgtaggctccgtatccaggattgtgccatccatatcaaaaattaaacctgcataacgctcgtacatggtcttctcgcaagtcgaaaaatatgacgctactttagcgtaattgcttgattttgtcgctgatggcgaaggagaagaaaattcaggaaatggataaaggagttatttagaaatgagatatttttgaaggaaattttttggagaagatggtgcatccgggaggatgactcactgacgttcgcccttcgggccgttgctggcgcaacgttatccttcctggtgcctgcggttaataccgctatctcttcgataccttcattgctgaaggttacggagaatatggtgcatccgggaggattcgaacctccgaccgctcggttcgtagccgagtactctatccagctgagctacggatgcatcgggaaaacttattctactgctgatattgataccgctactaaagccatatcaattaagagatggtgcatccgggaggattactcgccttgcggctcgcccttcgggccgttgctaaagcaacgttatcatccctagtgcctgcggttaattccgctacctcttcgataccttcattgctgaagatttcggagaatatggtgcatccgggaggattcgaacctccgaccgctcggttcgtagccgagtactctatccagctgagctacggatgcatcgggaaatttattttactgctgatattgataccgctactaaagccatatcaagtaagagatggtgcatccgggaggattcgaacctccgaccgctcggttcgtagccgagtactctatccagctgagctacggatgcatcgggaaacttactttactgcagattttttgataccgctactaaagccgtatcaagtaagagatggtgcatccgggaggattactcgccttgcggctcgcccttcgggccgttgctaaagcaacgttatcctccctggtgcctgcggttattaccgccacctcttccataccttcatcgctgaaagtacgtagaatatggtgcatccgggaggattcgaacctccgaccgctcggttcgtagccgagtactctatccagctgagctacggatgcaaatggcggtgaggcggggattcgaaccccggatgcagcttttgaccgcatactcccttagcaggggagcgccttcagcctctcggccacctcaccacacgcctcttacgagtgcttcgaagaacttgtttatcgctcatcgtcgctgcgtggcgcacatattactttctgagacttataagtcaaacaatttttcctacacttttatcgtttgcacacttcacgttcaattagtctgtaaaaacgtcaaaaagagtgttttatcaacagaagaatggaggtctgacagatagtagtaatgcaaaaaaatggagacttaagttgaatgaacgggagtaaagcgaaaagactatagagtgaaggagaaattttgagggtgcgtctcaccgataaagatgagacgcggaaagattagtaactggactgctgggatttttcagcctggatacgctggtagatctcttcacggtgaacagaaacttccttcggggcatttacgccaatacgtacctggttgccctttacccctaaaactgtcacggtgacctcatccccaatcatgagggtctcaccaactcgacgagtcagaatcagcattctttgctccttgaaagattaaaagagtcgggtctctctgtatcccggcattatccatcatataacgccaaaaagtaagcaatgacaaacacattacatctaagcagtcatggcattacattctgttaaacctaagtttagccgatatacacaacttcaacctgactttatcgttgtcgatagcgttaatgcgaatgccgtgaagcgagtccacggcattgcctgacgcttatattattgcaatttcgcgctgacccagcctttcacactggctaacgctgcaggtaaggccgcagcatccgtaccaccggcttgcgccatgtcaggacgtccaccacccttgccgcccacctgctgagcgaccataccaatcagttcccctgctttcacacgatctgtgacgtccttagatacgcctgcaatcagagaaaccttaccttcgactaccgttgccagcacgataattgtgctccccagctgattttttaaatcgtcaaccatggtacgcaacattttcggctcaacaccgctaagctcgctaaccaacagcttaacaccattaacatcaattgccttactggaaagatttgcgctctcctgtgcggcagcttgttctttaagctgttgtaactctttttccagctgacgcgtacgttccagtacactgcgcactttatcagccagattattgctatcgcctttcagcagatgcgcgacttcgcttaagcgatcgctgtctgcatgaacggtggcgatagcaccttctccggttaccgcttcgatacgacgaacgcctgcagcagtaccgctttcagagatgatgcggaacagaccaatatcaccagtgcggctggcgtgagtaccgccacacaactcggtagagaaatcgcccatgctcagcacgcgtacgcgctcatcatacttctcgccgaacagcgccatcgcacctttcgctttcgccgcttcgagatccatgatgttggtttcgatcggcaaattgcgacgaatctgtgtgttcaccaggtcttcgaccgcacgaatctcttctggtttcatcgcttcgttgtgactgaagtcgaagcgcagcaccttgtcgttaaccagactacctttctggcttacatgagtacccagaacctggcgcagcgcagcgtgcatcaggtgcgttgcggagtgattcagacgaatacgggcgcgacgagcctcatcaacatcagcctgcaccgcgtcgcccactttcagagaacccgcagcaagtttaccgatgtgaccaatcgcctggccgtatttctgcgtatcttccaccgcaaaggagaagttagcgcctttcagttcgcctttatcgccaacctgaccgccggattccgcatagaatggcgtttgatccagcacgaccacagcttcctggcctgcattgatggcatcaaccgctttaccatcaacaaacagcgcagtcactttgccgttcagttccagatggtcatagcctttaaattcagatgcactgtcaacacggatcattgcgttgtaatcggcaccaaagccgctggcttcgcgcgcgcgacgacgctgctcttccattgcagcttcaaaaccagcttcgtcaactttgatgttgcgctcacgacaaacatcagccgtcaggtcaaccgggaagccataggtgtcgtacagacggaaagcagtttcaccatccagcgtatcaccagaaagttttgccagctcttcatccagcaacgccagaccgcgctccagagtacgagcaaactgctcttcttcagtcttcagcacctgctcaacctgcgcctgctggcgtttcaggtcttcacccgcagagcccataacgtcgatcagcggaccaaccagtttgtagaagaaggtttctttcgcgccgagcatattaccgtgacgcactgcgcgacgaatgatacgacgcagtacataaccacggttttcattggacggcattacgccatccgcgatcaggaacgcacaagaacgaatgtggtcagcgattacgcgcaggcttttattgctcagatcggttgcgccagtgactttcgctaccgcctggatcagcgtgcggaacaggtcgatgtcatagttagagttaacgtgttgcagcaccgcagcaatacgctccagacccataccggtatctacagacggcttcggcagcggttccatcgtgccatcggcctggcggttgaactgcatgaagacgatgttccagatctcaatgtagcggtcgccgtcttcttccgggcttcccggagggcccccccaaatgtggtcgccgtgatcgtagaagatttcggtgcacgggccgcacggaccagtgtcacccatctgccagaagttgtcagatgcgtatggcgcacctttgttatcgccgatgcgaataatacgttcgcgcgggatccctacttctttttcccagatttcgtaggcttcgtcgtcgctttcatagacggtaacccacagacgctctttcggcagggcaaaccatttttcgctggtcagcagttcccatgcaaactgaatggcatcgtgtttgaaatagtcgccgaagctgaagttgcccagcatttcgaagaaggtatggtgacgcgcggtgtaaccgacgttttccaggtcgttgtgtttaccacccgcacgcacgcagcgttgggaagtggtagcgcgggaataattacgcttgtcgagcccaaggaacacatccttgaactggttcatcccggcgttggtaaacaacaaagttgggtcgttatggggtaccagggagctgctggcaactacctgatgtcccttactatggaaaaagtcgagaaacgcctgacggatctcagcggtgctcttgctcataattatcctgaaatcaagctaacgaaatatcgccaccagctccagcgtgtcttaaccgccgggctggtaactgaaaagtgggaataagataagttttcttgactgggaagtaaaataccgtatgcgttcagtcggcaaaatttcgccaaatctcctggatatcttccatcagatagccacgatagagcagaaaacgctggatcttaactttttcactaaagacagttggcaaaggttcgccatattttcgcgtcgcctgatcgcgcgccagtgcgcaccagtcgatgtcacattcacgcatcgctttttctgtcgcttcgcgggaaatacctttctgattcagttcctggcgaatacgcgcaggtccataacctttgcggctacggctggcgataaagcgcgcaacaaatcggctgtcatcgagatagccatgttcatggcaccaggcaataacgcgctcgtaatcttctgccgtagcatcaatctcttctgggccatttttgcccataatcggtgccgcgagtttacgtcgcagttcttgctcactgtgatcgcgcaccgccagaatgcgtaccgcacgatccaacaggcgagcatatgccgggcgacgggatgtactttctgtcatggcatatccttacaacttaaaaaagcaaaagggccgcagatgcgacccttgtgtatcaaacaagacgattaaaaatcttcgttagtttctgctacgccttcgctatcatctacagagaaatccggcgtactgttcgggttgctcagcagcaactcacgtactttcttctcgatctctttcgcggtttccgggttatctttcagccaggcagtcgcattcgctttaccctgaccgatcttctcacctttgtagctgtaccacgcgcctgctttctcgatcagcttctcttttacgcccaggtcaaccagttcgccgtagaagttgataccttcgccgtagaggatctggaattcagcctgtttaaacggcgcagcgattttgttcttcaccactttcacgcgggtttcgctacccaccacgttttcgccctctttcaccgcgccgatacgacggatgtcgagacgaacagaggcgtagaatttcagcgcgttaccaccggtagtggtttccgggttaccgaacatcacaccaattttcatacggatctggttgatgaagatcagcagcgtgttggactgcttcaggttacccgccagcttacgcatcgcctggctcatcatacgtgccgcaaggcccatgtgagagtcgccgatttcgccttcgatttccgctttcggcgtcagtgccgccacggagtcaacgacgataacgtctactgcgccagaacgcgccagggcgtcacagatttccagtgcctgctcgccggtgtccggctgggagcacagcaggttgtcgatatcgacgcccagtttacgtgcgtagattgggtccagcgcgtgttcagcatcgataaacgcacaggttttaccttcacgctgcgctgcggcgatcacctgcagcgtcagcgtggttttaccggaagattccggtccgtagatttcgacgatacggcccatcggcagaccacctgccccaagcgcgatatccagactaaggctaccggtagagatggtttccacatccatggaacggtcttcacccaggcgcatgatggagcctttaccaaattgtttctcaatctggcccagtgctgccgccaacgctttctgtttgttttcgtcgatagccatttttactcctgtcatgccgggtaataccggatagtcaatatgttctgttgaagcaattatactgtatgctcatacagtatcaagtgttttgtagaaattgttgccacaaggtctgcaatgcatacgcagtagcctgacgacgcaccgcatcacggtcgccgctgaagcattcccgccgggtaatgccttcaccgcgggcagtggcaaaagcaaaccagacggtgccgacaggcttctcttcactgccgccatccggcccggcgataccactaatagacacggcataatcagcacgagccgctttcagtgcgcctatcgccatttccaccacgacgggttcactcaccgcgccatgctgcgccagcgtctcttcgcgtacgccgatcatctgcgctttggcttcgttactgtaggtgacaaatccgcgttcaaaccaggcggagctaccggcaatatcggtaatcactttcgctacccaaccaccggtacaagactcggcagttgttacggttgcgccacgggctttcagcgcctgcccaacctgttcacttaactgcatcagttcactgtcagtcatcacaacctctgtcagtcaaaaatttatgccggacaagatagcactttcgtcaggaagatggtgttggcgttgcaattttacgaggaggattcagaaaaaagctgattagccagagggaagctcacgcccccctcttgtaaatagttactgtactcgcgccagcgccacggcttgtcctaactgccagaccgccattgcgtaatgggtgctgtggttgtaacgggtgatggtgtagaagttcggcagaccgtaccagtactggtagccggtgccaacatccagacgcagcaggctggcttgttgatggttgcccagcggctgctgtggcgttaaacctgcggcggcaagctggctaatgctgtacttagttttgaagccatttggcaagcctggagcctgaccgtttgccattaccgcgacctgatcgcctttcacccagccgtgcgctttgaaatagttcgccacgctaccgatcgcatcaaccggatcccacaggttgatatgcccgtcgccgctgaaatctaccgcatattgtttgtaagagctcggcataaactgtccgtagcccatcgccccggcaaaggaacctttcagattgagcggatcgtcctgctcgtcgcgcgccatcaacaggaaggtttccagctcgccagagaaatactccgcgcggcgtgggtagttaaaactcagcgttgccagcgcatcgaggatgcgagttttccccatcacgcgcccccagcgggtttcaacgccgataatcccgacgataatttccggcggtactccatacacctgccacgcgcgattcaacgcatcttcatactgattccagaaaaccacaccgttctgcacgttgtccggcgtaataaattttttgcgataacggagccatgcgccgttcggaccacttggcggtttcacgcttgtggttggtgcctggttatccatcagccgcagtacgctatccagacgcttcgcctgggagagaatttcctgcaactgctgacgatcgaaaccgtgtttgttcaccattttgtcgatgaactgctgggcattcgggttattagcgaaatcgccgcccatctgcatcacattgtgctgcggctcaagcaggaagccgccagacggcgttccggtggtcgtatcagtctcagtaggttttggcttgctgctacaggcggcaagcaacacaaaaaggggaagcaatgttacataacgacgcttgaacatgaggggtccatttaacagattcaaccaggggcaagtatggtaaagcatcacgccccgcacaaggaagcggtagtcactgcccgatacggactttacataactcaactcattcccctcgctatccttttattcaaactttcaaattaaaatatttatctttcattttgcgatcaaaataacacttttaaatctttcaatctgattagattaggttgccgtttggtaataaaacaataaatcctgaaggagagaacaatgatagaaaccattactcatggtgcagagtggtttatcgggctgttccaaaagggcggagaggtgtttaccgggatggtgaccggcattcttccgctgttgattagcctgctggttatcatgaacgcactgattaattttatcggtcagcatcgtattgaacgttttgctcaacgttgcgccggtaaccctgtttcccgttacctactgttaccgtgcattggcacgtttgtcttttgcaatccgatgaccctaagcctgggtcgctttatgccggaaaagtacaaacccagctactacgcggcggcctcttatagctgccacagtatgaatggcctcttcccccatatcaaccctggcgaactgtttgtttatcttggcattgccagcggtctgacaacgctgaacctgccacttggcccactggcggtgagttatctgctggttggtctggtcaccaatttcttccgcggctgggtgaccgatctgaccaccgccatttttgagaaaaagatgggcattcaacttgaacaaaaagttcacctggcaggagcaacaagttgaaataacacctggcaggagcaacatcatgacgcatattcggatcgaaaaaggaacgggtggctggggcggcccgcttgagctgaaagccacgccgggaaaaaaaatcgtctatatcaccgccggtacccggcctgcgattgttgacaaactggcacagcttactggctggcaggctattgacggatttaaagaaggtgaacccgcggaggtggaaattggtgtcgcggtaatcgactgtggcggcacattacgctgcggcatctatccgaaacgacgtattcccaccattaatatccacagcacgggcaagtccggtccgctggcgcagtacattgtggaagatatttatgtctctggcgtaaaagaagaaaacatcactgtagtaggtgatgcgacaccacaaccctcttccgtgggccgtgactatgacaccagtaagaaaatcaccgaacaaagcgatggtttactggcgaaggtgggaatgggcatggggtccaccgttgcggtgctgtttcaatctggtcgtgacaccatcgacactgtattaaaaaccattctgccgtttatggcattcgtcagcgcgctcattggcatcattatggcttctggccttggtgactggattgcccacggtcttgctccgctggcgagccatccactgggtctggtcatgctggcgctcatctgttccttcccactgcttagtcctttcctcggcccaggcgcagttatcgcacaggttatcggcgtattgattggcgtgcagattggtctcggcaatattccgccgcatctggctttaccggcactgtttgccatcaacgcgcaggcggcctgcgacttcatcccggtcggtttgagcctggcggaagcccgtcaggacacggttcgcgtcggtgtcccttctgtactggtgagccgctttttaaccggcgcgccgactgtactgatcgcctggtttgtctccggttttatctatcaataaaggctgaaacatgaccgttatttatcagaccaccatcacccgtatcggcgcgagtgccattgacgccctcagtgaccagatgctcatcacctttcgtgaaggcgcgcctgcggacctcgaagagtattgcttcattcattgccacggcgagttgaaaggtgcactccatcccggtttgcaatttagtctcgggcagcatcgctatccggtgaccgctgttggcagcgtggcggaagacaaccttcgcgaactgggtcatgtcaccctgcgcttcgatggtttaaacgaagcggaatttccgggcactgtccatgtggcaggccctgtccccgacgatatcgcgccgggaagcgttttgaagtttgaatctgttaaggagtaaaaaatgaatcaggttgccgttgtcatcggtggtgggcaaaccttaggcgcgttcctgtgccacggtctggctgccgaggggtatcgcgtcgcggttgtcgatattcagagcgacaaagccgcaaatgtggcacaagaaattaacgccgaatatggtgaaagtatggcgtacggttttggtgctgacgccactagcgagcaaagcgttctggcgctctctcgtggggtagatgaaatctttggtcgcgtggatttgctggtctacagcgccggaatagcaaaagcagcctttatcagcgacttccagctcggcgattttgaccgtagcctacaggtgaatctggtgggttatttcctgtgtgcgcgtgaatttagccgtttgatgatccgcgacgggattcaggggcgcattattcagatcaacagcaaatccggcaaagtgggcagcaaacacaactctggctacagcgcagcgaaatttggtggcgtcgggctgactcaaagtctggcgctggatctggcggagtacggcattacggtgcatagtctgatgctcggtaacctgctgaaaagcccgatgttccagagtctgttgccacaatacgcgaccaagctgggtatcaaaccggatcaagtcgagcagtattacatcgacaaagtaccgctcaaacgcggctgcgattatcaagatgtgctgaatatgctgctgttctacgccagtcctaaggcgagctactgcaccggacagagcatcaatgtcaccggcggtcaggtgatgttctgatcaacagcggagatccattaaggatctccgtgagactatagaatgcctgatgcgctacgctcatcaggcatacaggacttccgccactacattaaggaaaagttatggtatccgcactcatcaccgtcgccgttatcgcctggtgtgcgcaactggccttaggcggctggcaaatttctcgttttaaccgtgccttcgacacactatgccagcaagggcgggttggcgtgggccgttccagcgggcgctttaaaccgcgggtcgtggtcgccatcgcgctggacgatcagcagcgcatcgtcgacaccttgtttatgaaaggactgaccgtcttcgcccgaccgcaaaaaattcccgcaattaccggtatgcatgcgggtgatttacagcccgatgtgatctttccccatgatccactaagtcagaatgctctaagtttggcgcttaaactgaaacgtggataatttcgttgtgaatgttacttgcttgcgaagttatcattttgaaacctaaatcaggtaatcacgcccatgaaacctcgtcagcgtcaggccgccattctggagtatctgcaaaagcagggtaaatgcagcgttgaagaattggcgcaatactttgacaccacaggcacaaccattcgcaaagatctggtcattctggaacatgccggaaccgtcattcgtacttatggcggagtggtgttgaataaagaggaatccgatccgcctatcgatcataaaacactcatcaacacccacaagaaagagctgattgcagaagctgccgttagttttatccatgatggcgatagcatcattcttgatgctggcagtaccgttttgcagatggttcccctgctcagccgctttaataacatcacggtgatgaccaacagcctgcatatcgtcaatgcgctatccgaactggataacgaacaaactatcctgatgccaggcggaacgtttcgcaaaaaaagcgccagttttcacgggcaactggcagagaatgccttcgagcatttcaccttcgataaattgtttatgggcaccgacggcatcgatctcaatgcgggcgtaaccacctttaacgaggtttataccgtcagtaaggcaatgtgcaatgccgcgcgcgaagtgattttgatggcggacagtagtaagtttggccgtaaaagccccaacgtagtttgcagtcttgaaagcgtcgataagctgattaccgacgcaggtatcgatccggcgtttcgtcaggcgctggaagagaaagggatcgatgtgatcataaccggagagagcaatgagtgaagcactactgaacgcgggacgtcagacgttaatgctggagttgcaggaagcaagccgtttaccggaacgtctgggcgatgattttgttcgcgccgccaatatcatcctgcactgtgaaggcaaagtggtggttagcggaattggcaaaagcggccacattggtaagaaaatcgccgcaacgcttgccagtaccggcactccggctttttttgtccatccggcagaagcgctgcacggcgatctggggatgatcgaaagccgcgatgtgatgctgtttatctcttactccggtggcgcgaaggaactggatctgattattccgcgtctggaagataaatctatcgcgctgctggcgatgaccggcaaaccgacgagtccgctgggcctggcggcaaaagcggtgctggatatctccgtagaacgcgaagcctgcccgatgcaccttgcgccgacctccagcaccgtcaataccctgatgatgggtgacgcgctggcgatggcggtcatgcaggcgcgcggatttaatgaagaagattttgcccgctcccacccagccggggcactgggcgctcgcttgctgaataaagtgcatcatctgatgcgccgtgacgatgccatcccacaggtggcgttaaccgccagcgtgatggatgcgatgctggaactcagccgcaccggtctggggctggtggcggtatgtgacgctcaacaacaggtacaaggcgtctttaccgacggcgatttacgtcgctggctggttggcggcggcgcactcaccacgccagtcaatgaagcgatgacggtcggcggcaccacgttgcaaagccaaagtcgcgccatcgacgccaaagagatcctgatgaagcgcaaaatcactgccgcaccggtggtggatgaaaacggcaaactcaccggcgcaataaacctgcaggatttctatcaggccgggattatttaatccttcaatcccagacgtttcgccagccgatgcaggttggcgacgtcggtttccagcatccgcgcgcaggcagcccagttgtgatgattttgtgccagtgcctgacgaatagtttcacgctggaacgcttctgtcgcttcacgcaggttttgcttaacaacgggcaccgccgccacttctggcgtcggcaacgtcacctcaggaaaagcaaaatgttgcgcctcaagaatcacttcatcgccgctgcgggtggctctcgccagaactaccgcccgatgaatagcatgttccagttcgcgcacgtttcccggaaaactgtagtgttgcagtaaatttcgcgctccggcacttaataccacgcgggagagcccctgccgcaaacgacactgctcgcagaaataccccgccagcagaatgacatcatcgccccgctcacgcagcggcggcacgctaagtggaaacacgctcaggcgatgaaacaaatcggcgcggaatcgccctgccagcacctcttcgcgtaaatcgcggttagtcgccgccagcacgcgcacatcgacccgcaaacaacggtcatcgccaacgcgctgaatatcgccatactgcaacaccctcagcagcttggcctgcaatgccaagctcaactcgccgatctcatccagaaacagcgtgccgttatccgccatttcaaacttcccgctgcgattactgatagcgccagtaaacgctcctttcacatgcccgaacaactcactttccgccacactttccggcagtgcagcacagttgagatagaccagcggattcaccgcccgtgggctggcttcatgaatcgctttcgccaccagctccttaccggttccagtctcaccgctgatcaggacgttgagatcggacgccgccacaatctcaatctcttttttcagttgcgtcatgccaggggacaagccaatcatctgcgtctgtttcaccgcttcaaacggcgtggcatcgcctggcagcatattctggctttccagttgttcaatcagcaacgcattgcttaacgctcccgccgccagcgcagcaatcagccgtagctcttcgtcgctgaaaacatcgaactgatcgggctgcatcccgtcgagcgtcagtgcgccgatcaggttttgcccggcaaacaatggcagaccaacgcaggcgtgaaccttcagactctcctgcccaggaatcaaaccgtcatagggatcgggcaattcgctgtctgcgggaaagcgcaccacatccccggcgcgggcaatcgcttccagccgtggatgcccttccagcgcaaagcgtctaccgagtacatcctttgccagaccgtcgatggcaagcggaataaactgccggctatcgtaacgtagcaacgcagacgcatcgcactccagcacctgacgtagcgtggtgatcaggcgctgaaaacgatcctggtgaccaatcccacgctgcaattcgatggcgatattcgccagcacatcaacggaaaaactcatctttgcctcactgtcaatttgactatagatattgtcatatcgaccatttgattgatagtcattttgactactcattaatgggcataattttatttatagagtaaaaacaatcagataaaaaactggcacgcaatctgcaattagcaagacatctttttagaacacgctgaataaattgaggttgctatgtctattgtggtgaaaaataacattcattgggttggtcaacgtgactgggaagtgcgtgattttcacggcacggaatataaaacgctgcgcggcagcagctacaatagctacctcatccgcgaagaaaaaaacgtgctgatcgacaccgtcgaccataaattcagccgcgaatttgtgcagaacctgcgtaatgaaatcgatctggcggatatcgattacatcgtgattaaccatgcagaagaggaccacgctggggcgctgaccgaactgatggcacaaattcccgatacgccgatctactgtacagccaacgctatcgacagcataaatggtcatcaccatcatccggagtggaattttaatgtggtgaaaactggcgacacgctggatatcggcaacggcaaacagctcatttttgtcgaaacaccaatgctgcactggccggacagcatgatgacttacctgacaggcgacgcggtgctgttcagtaacgatgctttcggtcaacactactgcgacgagcatctgttcaacgatgaagtggatcagacggagcttttcgagcagtgccagcgttactacgccaatatcctgacgccgttcagccgcctggtaacaccgaaaattaccgagatcctgggctttaacttaccagtcgatatgatagccacttcccacggcgtggtatggcgcgataacccgacgcaaattgtcgagctgtacctgaaatgggcggctgattatcaggaagacagaatcaccattttctacgacaccatgagcaataacacccgcatgatggctgacgctatcgcccaggggattgcggaaaccgacccacgcgtggcggtgaaaattttcaacgtcgcccgaagcgataaaaacgaaatcctgactaatgtcttccgcagtaaaggcgtgctggtcggcactagcacgatgaataacgtgatgatgccgaaaatcgccgggctggtggaggagatgactggtttacgcttccgtaacaaacgcgccagtgctttcggctctcacggctggagcggcggtgcggtggatcgtctttccacgcgcctgcaggatgcgggtttcgaaatgagccttagcctgaaagcgaaatggcgaccagaccaggacgctctgaagttatgccgtgaacacggtcgcgaaatcgcccgtcagtgggcgctcgcgccgctgccgcagagcacggtgaatacggtagttaaagaagaaacctctgccaccacgacggctgacctcggcccacggatgcagtgcagcgtctgccagtggatttacgatccggcaaaaggcgagccaatgcaggacgttgcgccaggaacgccgtggagtgaagtcccggataacttcctctgcccggaatgctccctcggcaaagacgtctttgaagaactggcaagcgaggcaaaatgagtaacggcattgtgatcatcggtagcggcttcgccgcccgccaactggtgaaaaatattcgcaaacaggacgccactattccattaaccctgattgccgccgacagcatggatgagtacaacaaacctgacctcagccatgttatcagtcaggggcaacgtgccgatgaccttacccgccagacggcgggtgaatttgccgagcagtttaatctgcacctgtttccacaaacctgggtgacggatatcgatgccgaagcccgtgtggtgaaaagccagaataatcagtggcaatacgacaagctagtactggcaaccggtgccagtgcctttgtcccgcctgtgcctgggcgtgagttaatgctgacgttaaatagtcagcaagagtatcgcgcctgtgaaacgcaactgcgggatgcccgacgcgtgttgattgttggcggtggtttgattggtagcgaactggcgatggatttttgtcgtgcaggcaaagcggtcacgctaatcgacaacgctgccagtattctggcgagcttaatgccaccggaagtaagcagccgcttgcagcatcggttgacggagatgggcgttcatctgctgttgaaatctcagttacaggggctggaaaaaacggattctggcattcaggcaacgctggaccgccagcgcaatatcgaagtggatgcggtaattgccgccaccggactgcgcccggaaaccgccctggcacgacgcgccgggctgacgattaatcgcggcgtttgcgtcgatagttatctgcaaaccagtaataccgatatttacgcgctgggcgattgcgcggaaattaacggtcaggtattgccgttcctccagccgattcaacttagcgcgatggtgctggcaaaaaatcttctcggcaataacacgccgctgaaactcccggcgatgctggtgaaaatcaaaacgccggaattaccgctgcatctggcaggcgaaacccagcgtcaggatttacgctggcaaattaataccgaacgccagggaatggtggcgcgcggcgttgacgatgctgaccagcttcgcgcctttgtggtcagtgaggatcggatgaaagaggcatttggattgttgaaaacattgccgatgtaagtgggctactgtgcctaaaatgtcggatgcgacgctggcgcgtcttatccgacctacggggacgcatgtgtaggccggataaggcgtttacgccgcatccggcaatggtgtccaaatgcaacacgttttatccgttctggacttcacccgctaaccaacgcgccgcagcaataaccccctgccccagagacaaaccgccatcacccgccggtaaactctgtggaaagagcaatgtgaaatcagcgagataatgcgccagacgtgcacgcagcaaacggttatgaataaccccgccgctaaataccagcgtagtgataccacgcatcgtggcctgctcacgcatcaacgcggcaaaaccctgcgccagcgtatcatgaaacgcccacgcgcgttgattaaccggtgcctgccagttcagccactgctgccagaaagtggcgagatccagttgattgtccacccgcggcattgtcaccggatgcgtcactccgtggcaactggctgcgagcgcctccagagcacaagccgcttcaccttcataacttaacgtggctggcgcacagcccagtgccgccgccactgcatcgaaaaaacgcccacagctactcgccagcggcgcgttaattccacgctcaatggcccgcgccagcacgctccagttttgctgttgcacacttgctgtttcagagtaattctgccactccggcacaaagcgcaggcactgcgccagcaggtttcgccacggctgcttcgctgccaaatcgccacccggaagcgccactgcaggcaagccgcccaggtgctcacattcgcgatagttcacccgcaggcactcgccgccccacaaagcgccgttctcccccataccgataccgtcgagcgtcaaagcaatgacatcaccgccatccagcggccactgatgctctgccagacacgccgctgcatgggcatgatgatgcagtaccgtttgcgtcggcagattcatttcacgcgcccactggctggagacatagcccggatgcgcgtcatgcacaacgtattgcggggtaaaatcgtagatgttttgcatcaggcgtaacgcttcgcgccactgcatctggatgccatcgtcacttaaatcgcccagatgctgactcaacaccgcttgttcaccgcgcaccaggcagaaggtatttttcagatccgcgccgagacacagcacaggcggaacatttttaaagcccggaggcaaagccagcgcatccggcacatacccccggctacggcgcagcatttcgccgctttcgcgcaccacgctatcatccatccgctgcacgatgtcgcggttatgtatcaagaatccgtcggcaatgccctgcaaatccgccagcgcctgttcgttgctgatagctggtggtttaccgctcaggttgccggaggtcatcaccagcgggcattgcagttcctgtaacagcaaatgctggagcgggttcgcaggcaacattaccccgacttcgttaaggtcaggggcgatatcatcacaaagctcaggaacgtattttttatccaccagcacaatcggcgcggcgggcgtggtaagcaactggcgcgcagcgtctggtaaaccgtcagccactggcaacatgaccgccagcggtttcgccgggcgatgtttgcgcgcccgaagtgtcgccaccgcgttactgttacgtgcatcgcaggcaagatgaaatccgccaatccctttgatggcgacaattttgcccatttttaactgtgcgatagctgcctgtaatgccgcctcttgttccgcatgttcaccatgacttacccattcaagatgcgggccacactccgggcaggccaccggctgggcgtggaagcgacgatcgagcgggtcacggtactctttgtcacaggccggacatagcggaaacgccgccatcacggtaaacgggcggtcgtaaggcatggcgcgaataatggtgaaacgcgggccgcagtgggtacagttgataaacggataacgataacgccgttcgcctggggtattcatttcggcaaggcaagcagggcaagtagcggcatcgggaacaatttgcgtattcatggtgccgcctgtgctctggcgtatagtgaactcggtgggcagttgactccagataaacggctcacgctcgacgctatcaatacgcgccagcggcgggcagtgctgatacaattgaacaagaaacgtttccgggtcttcccgcagccggacttctacgccatcgccgtcattacagacatcgccgtgaagatttaattgctgtgccagctgccagacaaacggacgaaaaccgacgccctgcactttgccacgaatacgcagttggacaccgcaagatgtgttttttgccattgagttattcccgccatcatgaattgcgtaacccgccctgccggacacgacagcgtcgcatccggcagtcacaggtcggcgataccgcccgctccgtattctacgaatatttccgggaattcctttgatgccagaacagttctgtaagatttttagaacatcagcgccgtacggcggcgtttttctgcgctcagttgttcaagtttattacgatcgacacaaatcagcgcatgagtcgggcaagccgccatacacgccgggccgtcttcacgatggttgcacaggtcgcatttattggcttcggctttgtcagcccgtacattcagacccgcgccgctgttgcggatcaccggacgtaccaccacttccatcgcaccatacgggcaagccacaacgcaggttttgcaaccaatgcaacgttcctgcatcacatgaacaaaccctttatcacggctgatagcaccattcgggcagacgttagcgcacggtgcatcttcacactgacggcaaactgtcgccgtggaaatgttcacacctttaatgacatggatacgcggtaaaaaagtttccggggtcaggcttgcacagtcctgattttcctgatgagaaaccacgcacgctacttcacaggtacggcaaccaatacatttactcgcgtcagcaatgatgaaacggttcatcaaattctccagcaatgacagttaatgcgccgatacattcacaaatcatgccagtttttaatttactgttatttaaggaaattaatttctgtaatgcaggaaaaacgatgtcatcgacactagtgacgatgacatgtgatgacaatgtttatcggctaggagcaatgagactgtcgcggcggatcagttttccgctgaaggttttcggcggactgaaatccccgccatcgagcataaaaatcagccgtccaataatttcctgaatcatctcagtcaccggaatttttacgctggagagcgccggaacggtgtagggggcaatagcgatatcatcgaatccgataacactcacctgctctggcaccgctacgccgcgctcgtgtaacgctttcatcgcacctatcgccatatcgtcgttactggcaactaacgcgctaaatttagccccacgttcgagcaacatttctaccccttcggccccgctggcaggcgtccatttaccgttagcgataagtttttcattgagcgcaataccatgctgcgccagcgcgtctttatacccggcaagacgttcaatgttggtgggggaatccatgctgccggtaaggaaagcaatctcctgatgcccggcgtttatcaactctgccacggcgttaaaactggtctgtttatgatcgcaccagacgctatggctgctgtttttgcgcaggcggcgattaagcaccattatcggctgactgtgcgcgtcaatgatgtcatcgatctcatccacgcttaaaaaacgcgggtaaatcatgatcgcgtcgcagcgcagatccagcagatactgaatcgcctggcgctcttcttctgcgctgtgtttaccatctgccaatagcaactgccgccctttctcttccgccattcgcgcggcatgaaagagtaattcactaaaataaatgccgtggtaaagcgtgttggtcactaccagccccagcgtctgagtactcttcgcgctcagattgcgcgccagcaagtttggacggtaaccgctctcttctaccgcctgaaacacgcgatctttagtctcctggctgacgtagccattaccactaagcacgcgggaaacggtcgctttactaaccccggcgcgcttcgccacttccagcatcgtcgtcatcattttcatccctttacacgcaatcaacgcagtgtactgcaccgtttgccgattgtccttgcacaatcggcgggaaaaatattcaggtgaccggtttcacaaatataaaaaatgaacaattcactctcttgcttatttagtgacaactattcatgattttgtgaaaccggtttcttaattccgtttcagcatcggcatttttccgtcacgtcgactgataacaactacatctaccctactgataacaggataaaatccgatggccaaaaattatgcggcgctggcacgcagcgtgatagcggcactgggcggcgttgataacatcagcgcggtcacgcactgtatgacgcggttgcgctttgttatcaaagatgatgcacttatcgacagcccgacgttaaaaaccatccccggcgtgctcggcgtggtacgtagtgacaaccagtgtcaggtgattatcggcaataccgttagtcaagcctttcaggaagtcgtcagcctgctgccgggagatatgcagcccgcacagcccgtgggtaaacccaaactcacgctacgtcgcattggtgcggggatcctcgatgcgctgatcggcaccatgagtccgctgatcccggcgattatcggcggaagcatggtcaaactgctggcaatgatcctcgagatgagcggcgtgctgacaaaaggaagcccgaccttaaccattctgaatgtgattggtgacggtgctttcttcttcctgccgctgatggtcgcggcatctgccgccatcaaatttaaaaccaatatgagcctggcgattgccatcgcgggtgtgctggtacatccgagttttattgaactgatggcgaaagcggcccagggtgaacatgtcgaatttgccctgattccggtcaccgcggtgaaatacacctacacggtgatcccggcgctggtgatgacctggtgcctgagttatatcgaacgctgggtggacagcattacaccggcggtgaccaaaaacttcctcaaaccaatgctgattgtgttgattgccgcaccgctggcaatcctgctgattggcccgattggtatctggatcggtagcgccattagcgcgctggtttacaccattcatggttatctgggctggcttagtgtcgccattatgggcgcgctgtggcctctgctggtaatgaccgggatgcaccgcgtctttacgccaaccatcattcagaccattgccgaaaccggcaaagaagggatggtcatgccgagtgagatcggcgctaacctgagcctgggcggtagtagtctggcagtggcgtggaaaacgaaaaacccggaactgcgtcagacggcgctggctgcggcggcaagtgccattatggcggggatttccgaaccggcgttatatggcgtggcgatccgcctgaaacgtccgcttatcgccagtcttatcagcggttttatttgcggcgcggttgccggtatggcggggcttgccagccacagtatggcagcgccggggctatttaccagcgtgcagttcttcgatccggcgaatccaatgagcatcgtctgggtgttcgcggtcatggcgctggcggtggtgctgagctttatcctcacactgttgctcggctttgaggatattcctgttgaggaagcggctgcccaggcgcgaaagtatcagagcgtacaaccgaccgtcgccaaagaagtaagtcttaattgaggatgaaaatgagtgtatttccagaaagttttttatggggcggcgcgcttgccgccaaccagtctgaaggtgcgttccgtgaaggtgacaaaggtctgaccactgtcgatatgatcccacacggcgagcatcgaatggcggtgaaactggggctggaaaaacgttttcagttgcgagatgacgagttttatcccagccatgaggcgacggatttttatcatcgttataaagaagatatcgccctgatggcagagatgggattcaaggttttccgtaccagtattgcctggagccgtctctttccgcagggcgatgaaatcacgcccaatcagcagggcattgctttttatcgttctgtctttgaagagtgtaaaaagtacggtatcgaaccgctggtcacgttgtgccacttcgatgtgccgatgcatctggtcaccgaatatggctcctggcgtaaccgcaagctggtggagtttttcagccgctacgccagaacctgctttgaagcatttgatggtctggtgaaatactggctaaccttcaatgaaatcaacattatgttgcatagcccgttctccggcgcgggtctggtgtttgaagaaggtgaaaatcaggatcaggtgaaatatcaggccgcgcatcaccagctggttgccagtgcgctagccaccaaaatcgcccatgaggttaacccgcaaaatcaggtgggctgtatgctggcgggcggtaacttctacccttacagttgcaagccggaagatgtctgggcggcgctggagaaagaccgggaaaacctgttttttatcgatgtgcaggcgcggggcacgtatccggcttactctgcccgcgtattccgcgaaaaaggggtaaccatcaacaaagcaccgggcgatgatgaaatcctgaaaaacaccgtcgattttgtctctttcagctattacgccagccgctgcgccagcgcggagatgaacgccaacaacagcagtgcggcgaacgtggtgaaaagcctgcgtaatccgtatctacaggtgagcgactggggctggggaattgatccactcggtctgcgtatcaccatgaatatgatgtacgatcgttatcagaagccgctgtttctggtggaaaacggcctgggcgcaaaagatgaatttgctgccaatggcgagattaacgacgactatcgcatcagctacttacgcgaacatatccgcgcaatgggcgaagcgattgcagacggcattccgctgatgggctacaccacatggggctgtattgatttagtttccgcctctacgggtgaaatgagcaaacgctacggctttgtctttgttgaccgtgacgacgcaggcaacggtacgctgacgcgcacgcgtaagaaaagtttctggtggtataaaaaagtgattgccagtaatggggaagatttagagtaagtaacagtgccggatgcggcgtgaacgccttatccggcctacatgtcgcacgaaccatgaaggcccgataagcgcagcgcatcgggcaatttagcatttggcatcagagctggttcaccccatcaagaacatccctgtcctgattccttaatgaaaaattactcttcttccaccgctaactgcgcgaagccgccatttccttcccagccttccagtcgttgataaacggtttctaccgcatctttaatcggctgggtcatcgggtagtaaaagccgacgatatccggctgaatgccgaggaaaatcacttcgccaatatcttctttcaactggtcgataaggtaattcaacggcatgttatgggtagtcatcataaacatctcggcgatatcatccgggtcgatgatgcggatctcgccggggtttagccccatatccgtggcgtcgacaatcagcagtcgtgtcgggcgcagttcacggatagcgacgatgtcgttttccggtgcgctaccgccgtcaatcaccacccagttacctttcggcgcggcggcgcacttttccgccagcagcggacctgcgccatcatcgcccatcatgctattgccaacacagagtaaaacgtcagtcacgcagtctcctcaccatcaaatagatggcgttttcctgatgaatatcatgcagcatacttaacagcattgtactccattcctgctgctggctagtttgcgctgcccgggctttatcgaatgcgttggccagcatcggcacatggttaatgtcgatgacgatctcaccatatttcggcacgccttccattttgcggcgggcttcactgcctgcctccagagtggcaatccatgccagatattcatcccacgggcaggtgagcgccgcttccaggcaatcgataaccccaaggtggtgaccaatcgccaggctgtaatagaccacctgctgcgcctcggcgggcgtggcatcgttctcatcaataaatttatggctcagttgactgaacaccaccttttcactcatcggatacgcgcctcttcaacaacatgattcagatggctgacaatctcgttcagacgcggatcgttttccgcttccagccagcgtgcaacctgttcttcgccctgccctaactgtgtaaggtaatcatcggcaatctgacgaccgtaacgataacccgccaggcgacgtgcttcgcgatccactttcacgcgcagcggctgcaccatatcaccatgcaggatctccgccggttgttcatccagttcacccggcccacgggcgtgaattttctgctccagcaggccgagcgccattgcaaagccgtacagcgtggcggcaggcgttggcgggcagccagggatataaacatccacagggacaattttatccgtaccgccccacacgcagtagagatcgtggaagatcccgccactgttaccgcaggcaccgtaggagatacaaattttcgggtccggcgcggactgccacgcacgcagcgcaggggatcgcattgcacgggtgaccgcgccggtaaacagtaaaatatccgcatgacgcggactaggaacgactttaatgccgaagcgttctgcatcaaacagcgggctaagcgtggcgaaaatttcgatttcgcaaccgttgcagccgccgcagtccacgcggtaaacataggcagaacgtttgatttttttcagtaagctcgccttcatgctggcgatggattcatccaccgtcatggggaccggaatgccgttggcgtcacgggggcctaataaattgctcatcagatggcctctttcatatggcgagtcagttcaatacggtcggacggcaccaggcatttctggcgcttacattccgggcaagtctcaaagctttcgcggtggttttccgcgcggctgtcgccgttgtgcttaagcagcgcaatggcgtagtcgatctctttctggacggcgaaaggacgattgcagacgcggcagttgcacagcgcgaagcgggactgttgcaggaagtcttctttcttccacaccgccagttcgtactcttggctcagtttgatcgccgccgtcgggcagacttcttcgcagcgtccacagaagatgcagtgcccaagattaaactcccaggcaagctctcctgtggcgaggtcagtttcaaccgttaaggcgttactcgggcaggcattgacgcaggccgcgcagccgatgcactgctgcgggttctgctctggcttaccacggaagtttttatcaaccgcaatcggctccagcggataagagctggtcgccgtgccggttttgatgacttttttgataaaggtaaacatggcgattccttatttcagcgggctgtttttacgctcaatgctgtaacgctcgagttctttgtacggcaccactttgctcttcttcttacgcacatcgaccacggtcatgcggtcggtacaggagtagcaagggtcgaggctaccgataatcagcggcgcatcggaaacggtgttgccgcgcagcatgtagcgcagggtcggccagttcgcgtaggtcgcggcacggcagcgccagcggtacagcttctggttgtcgccggtcatgctccagtggatatcatcgccgcgcggcgcttcggcaaagcccagcgcaaagcggtgcggaatgtaggtaaagccttccaccatcagtgggccacccggcaggttatccagaccgtagtcgatcatgttcagcgcggtatagacttcgttgatacgcactttcagacgggaaataacgtcgcagccctgctcgctgtggacttccattggcagcaggccatagccgacaaacgggtgatcggcgcgggtatcacgggcgtgaccgctggcacggaccatcgggccgacgttactgaagtcgcgagcgatttccgggtccagacgaccaatgccgacagtgcgctgttccatgttcggagtgctcagcagcacatccaccagctcctgcacttcacgacgcatctgttgtgccagctggcgggtctggatcatgtcgtctttcagcagatcgcgacgaatcccgccgatcaagttcaggccgtaggttttacgcgcaccggtaaggatctctgccattttcatggaggtttcacgcacgcggaagaactgcataaagccggagtcgaagccggtaaagtgacaggccaggccaaggttgagcagatggctgtgcaagcgttctacctccagcagaatggcgcggatcatctgcgcacgttctggcacctgaatacccatcgcgttttccacgctcgtggtgtaggcggtgctgtgggcaaagccgcagatcccgcacacacggtcagagaggaaggtcacttcgttataacccatacgggtttccgccagtttttccatgccgcgatggacgtagaacagacggtagtcggcgtcgataatgttttcgccatcgacgaacagacggaagtggcccggttcatcagaagtgacgtgcagcggaccaatcggcacgacgttgtttttcttgtcgcccagttcgttgatgaactcgtaggtttcagcatcggtggtcggtgccggacgctgacgataatccatgctgtctttacgcagcggataaagttcatccggccagtcatccggcagcaccagacgacgttcatccggcagaccaaccggaatcaaaccgtacatatcgcgcacttcacgctcgccccacaccgccgccggaacgcgcggcgtcacggacggatattccggtttgttggcgtcaacttcgacgcgaaccgtaatccaacacttagtgcccttctccatgctcagcacgtagtaaacggcgtaatgaccattcagtttgcgttcgtcgttaccaaacagcacgctcagccagccaccctgtttgtagtaaagaaactccaccacttccggcaggtagttcacctttacggtgacagtcagctgatctttggtctgccaggcgtggtccagcacgacgcccggaaatgcctcattcagcgcggcgagataatgttgacctaatttttcttcagacatgctcaaactctctttaatcacgccgccagcaaggagacgaacgctaaaaatgcaaagccaaacccagcccaggtaatgcgcggagtaatatcaagacgcagacgggccatgctgttttcgaacagcgcgataaccaggacgccgaccaccagttttacgatggcaatcaccagcgccagcagcagtccaccggcggtgaaggtttccatttgtccccacggaataaacaccccgacgaacatctgcaacaccaccagctgtttcaggctgataccccatttcatgacgccaaagccgctgccgctgtattcagagagcgggccttcctgcagctcctgctcggcttccgccaggtcgaacggcagtttgcccatttcgataaaggtggcgaacgcacaggcacaaagcgccagtaccagcgggatgctctggctcagcggccagtgataaacggtgtcggtgatgttgctgatgttggtggaaccggcaacctgtgcggcaacccacagaccaagcagcagcatcggttcgaccagcacgccaagcatcgcttcacggctcgcgccgatagcggtaaacgggctaccggtatccagaccagaaatggcaaagaagaaacgcgcgatggcaaagagatacagtaaggtgatcaaatcacccagttgcggcagcggagaaccgacggtcaccaccggcagcgcagtagcgatagtcagcatgacgcccaccatcacatacggcgtcaggcggaacacccagccggaggcatccgggccgacgctctgacgccccagcagtttgataatgtcgcgatactcctgcaacacgcccggcccgcgacggttatgcaagcgggcgcgcgccacgcgggttataccggagagcagcggcgcaacggcaaataacaccagcgcctgaattaacggatataaaacactcattctcaggctcctcgactaacaataatcaccaccagtaccgccagttcaaccagcgccatccggcggaacagcaacgcactcccctcgcactgccagcccggcaccagagacaccggattcagccatttgcgtagtttcagcaccggcgcaaacgcctgtttcaccggcatggcaaaaccgtgagcggtaatcaccatacttttttcgtggtcgtaaccgcacacccaggccgcaccgcgggaacggcttggcaaacgatcgcctttgcaaatcgccataatgatgaatggcagcagcgggcaggcaatcagcagcaacgtgatcatcggttgagaaacggtggtgttagcaggctccagcggcagaggtacagcagcagagagcatcggcagtagccacggcgcagcaacaccgccaattacgcagcaaatcgccagtgccactacgcttacgctcatcaggagcggcgcacaggtggcgttttcggcttctttggtgcgcggcgcgccgaggaacgtgacgccatagactttcgccatacacatcaccgccagcgcaccggtaattgccagccccacagcgagcagcggccccagcagacgggcaacaaacgcgccactattgctcagtttgaaaaaactttgatagataacccattccccggcaaaaccattcagcggcggcagcgcagccattgccatcagcccgactaacatggcgatggagataaccggcattttcttgccaataccaccgagtttttcgatatcgcgatgaccggtacggaaccagacgctccccgccccgaggaacagtacgcttttgaacaggctatggttaagcagatggtacagaccaccgaccaggccaagagcaatcagcgccggttgttcgagcgcgatacccgttacgccagcgcccagccccagcaggatgatgccgatattttccagggtgtggtaagccagcaggcgctggatgttgtgctccaccagcgcatacagaccaccgacaaacgcggtgatcatgccgagcaccagcagcgcgatcccccaccacagcggtgcattaccgcccagcagactcagggttaaaatgcccagcaggccaattttcatgactaccgtagaaaacaacgcggcagctggcgcagaggcgttcgcatgtgcctgcggcacccagccgtgcagcggaataatcccggccagcaggccaaagccaatcactccgagcagccagatatcggaaccgagcggcagctgttgcatacgcatatccagcaggcgcagatccagcgtgccgtaacgctgccacagcagccagcaagcaatcgccagcagcagagtgccaagacgccccagcgcaaaccacagtttgccctctttgctgttgctggtgaggaacaccgcgcacagggccatgatttcggccattaccacgaacatgccgaggttgctggcaatgacggcgcagacggcggcagccatcaacatattgatctgcaagccgttgcacttcacctgcgcgtggcgatgccagtcaatgttgtagaggctgacaaacagaccgcacagaccgagcgtaatcagccaaatcgcgttaagcggagagatttgcacatcgtagcttaccaggctcagcgcaccgctcacgccaaccgcgccagtcagtacagtgaagcccgcggctgccgtatacagactaccaaccgcgccgccaattccagctatccagccacttaacgctttttgaaaagaaaagagaaatgccagaacagcggcggcgacaaaccacgccacgccgctattgatcagggaaattgcgctcatttagcctctccactttgagcctgctgaaacaaggtgagatcgccaaagtccgtgttaaaggtcagctcacgcttacgtttgctgacgcgggcgatatcggtgttatccaccagatgcagggctttagtcgggcacatccgcacgcaggccggaccttgttcatcaaagctacaaaggtcacatttgacggcgatcgcgcgaatacctggcacccagtcaagcaatgtgctgacacgcgccggagcaggcggtgccggtggcgctttcggggtattggcgtttgccggaatatccagcggacggctgccggaaaattcaattgcgccaaacgggcaggcgatgccgcacagcttgcagcttacgcacaggctttcattcaactgcacggccccatcgacgcgggtgatggcgttaaccgggcagaccaccgcgcagggtgcatcttcacagtggtgacagagctgcggcgcagattctttttcattcagcatcactctcaggcgcggcatactttgcaggccgtgctggcgatgcgtctcactacaggcggcctcacaagtgtggcagccgatacagagcgtggagtcagcaattacaaaacgattcaccaggcattcctcaggtgattgtcatttttgacgaaaacatgccgatgaaatgtcattttcgacactcatcgacacgcccatccccaaacaggcgtaacgcctgcaaaacgggcaaagcctcagctcatgctgccgggctttgtccctttaccagttggcttaaattcaccggcacattgttttcaatagcggtgtataagctgtcgtaaacgccagcgattttttcgagatagtgttccagaacctgttcgcgatcgcggatgttgaccttgccatcaatcatgccgtcaatgctcagttgcgcctgcgcaatccgctgtttgtcttcgccatcttttgtttcgacgtaatactcgatggtgtggctgttaaagccatccgccagggtgacgtaaatgcgaaaatgttcaaaaaggacgaaacagagttctttgtccggcgcgcagctcatggcgtgatgcaggcgcgctttgcttaacgtgatcccctgaaccaggctattgcagtagatgtgccactggtcctgtaggcgacgatgccgctgtgcgatgtaatcggctttctcgcttatttcccaaatagtcattgtcaggttacccgtttaacagagatgccagctttaagcattttttgtgccaacttttaatttattgttattaaagagatttttaagctaaagatgaatttcgtcgccgtgtcgacgtgtcatttcgacatcatcgacattattcaccgcagggataatcaacactggcacaattattgcttgtagctggcaatagttaatgggaggcgatatgcacgaaataaccctctgccaacgggcactggaattgatcgaacagcaggccgcaaaacacggcgcaaaacgcgtaactggggtctggctcaaaattggcgcattttcttgtgtcgaaaccagctctcttgccttttgttttgatctggtttgccgcggcagcgtggcggaaggttgtaaactgcacctcgaagaacaagaggccgaatgctggtgtgaaacatgccaacagtatgtgacgctactgacccagcgcgtccgccgctgtccacagtgtcatggtgacatgctgcagattgtggcagacgacggtttacagattcggcggatagaaatagaccaggagtgagcgatgtgtacaacatgcggttgcggtgaaggcaacctgtatatcgagggtgatgaacataaccctcattccgcgtttcgtagcgcgccatttgccccggcggcacgcccgaagatgaaaatcaccggcattaaagcgcctgaatttacccccagccagactgaagaaggcgacctgcattacggtcatggcgaagcgggcactcacgcaccgggcatgagccagcgtcggatgctggaagtcgaaattgacgtgctggacaaaaataaccgtctggctgaacgcaaccgcgcgcgctttgctgcccgcaagcaactggtgctcaacctggtttccagccctggttccggtaaaaccaccctgctgacggaaaccctaatgcgcctgaaagacagcgttccgtgcgcagttattgaaggcgaccagcaaaccgtgaacgatgccgcacgcattcgcgctaccggcacaccagcgattcaggtgaacaccggtaaaggctgccatcttgacgcacagatgattgccgacgccgcaccgcgtctgccactggacgataacggtattctgtttatcgaaaacgttggcaacctcgtatgcccggccagcttcgatctcggtgaaaaacacaaagtggcggtgctttccgttaccgaaggtgaagacaaaccactgaaatatccgcatatgtttgccgccgccagcctgatgctgctcaacaaagttgacctgttgccgtatctcaactttgacgttgaaaagtgcatcgcctgcgcccgcgaagtcaatccagaaattgaaatcatccttatttccgccaccagcggcgaagggatggaccagtggctgaactggctggagacacagcgatgtgcataaggtaaaactggctggagacacagcgatgtgcataggcgttcccggccagatccgcaccattgacggcaaccaggcgaaagtcgacgtctgcggcattcagcgcgatgtcgatttaacgttagtcggcagctgcgatgaaaacggtcagccgcgcgtgggccagtgggtactggtacacgttggctttgccatgagcgtaattaatgaagccgaagcacgcgacactctcgacgccttacaaaacatgtttgacgttgagccggatgtcggcgcgctgttgtatggcgaggaaaaataatgcgttttgttgatgaatatcgcgcgccggaacaggtgatgcagttaattgagcatctgcgcgaacgtgctagtcatctctcttacaccgccgaacgccctctgcggattatggaagtgtgtggcggtcatacccacgctatctttaaattcggcctcgaccagttactgccggaaaacgttgagtttatccacggtccggggtgcccggtgtgcgtactgccgatgggtagaatcgacacctgcgtggagattgccagccatccggaagtcatcttctgtacctttggcgacgccatgcgcgtgccggggaaacagggaagcctgttgcaggcaaaagcacgcggtgccgatgtgcgcatcgtttacagcccgatggatgcgttgaaactggcgcaggagaatccaacccgcaaagtggtgttcttcggcttaggttttgaaaccactatgccgaccaccgctatcactctgcaacaggcgaaagcgcgtgatgtgcagaatttttacttcttctgccagcacattacgcttatcccgacgttgcgcagtttgctggaacagccggataacggtatcgatgcgttcctcgcgccgggtcacgtcagtatggttatcggcaccgacgcctataattttatcgccagcgattttcatcgtccgctggtggttgctggattcgaaccccttgatctactacaaggcgtggtcatgctggtgcagcagaaaatagcggcccacagcaaggtagagaatcagtatcgtcgagtggtaccggatgccggtaacctgctggcgcaacaggcgattgccgatgtgttctgtgtcaacggcgacagcgaatggcgcggcttaggcgtgattgaatcttctggcgtgcacctgacgccggattatcaacgattcgatgccgaagcacatttccgcccggcaccgcagcaggtctgcgatgacccgcgcgcgcgttgtggtgaggtattaacgggcaaatgtaagccgcatcaatgcccgctgtttggtaacacctgtaatcctcaaaccgcgtttggtgcgctgatggtttcctccgaaggagcgtgcgccgcgtggtatcagtatcgtcagcaggagagtgaagcgtgaataatatccaactcgcccacggtagcggcggccaggcgatgcagcaattaatcaacagcctgtttatggaagcctttgccaacccgtggctggcagagcaggaagatcaggcacgtcttgatctggcgcagctggtagcggaaggcgaccgtctggcgttctccaccgacagttacgttattgacccgctgttcttccctggcggtaatatcggcaagctggcgatttgcggcacagccaatgacgttgcggtcagtggcgctattccgcgctatctctcctgtggctttatcctcgaagaaggattgccgatggagacactgaaagccgtagtgaccagcatggcagaaaccgcccgcgcggcaggcattgccatcgttactggcgatactaaagtggtgcagcgcggcgcggtagataaactgtttatcaacaccgctggcatgggcgcaattccggcgaatattcactggggcgcacagacgctaaccgcaggcgatgtattgctggtgagcggtacactcggcgaccacggggcgactatccttaacctgcgtgagcagctggggctggatggcgaactggtcagcgactgcgcggtgctgacgccgcttattcagacgctgcgtgacattcccggcgtgaaagcgctgcgtgatgccacccgtggtggtgtaaacgcggtggttcatgagttcgcggcagcctgcggttgtggtattgaacttagtgaagcggcactgcctgttaaacctgccgtgcgtggcgtttgcgaattgctgggactggacgccctgaactttgccaacgaaggcaaactagtaatagctgttgaacgcaacgcggcagagcaagtgctggcagcgttacattcccatccactggggaaagacgcggcgctgattggtgaagtggtggaacgtaaaggtgttcgtcttgccggtctgtatggcgtgaaacgaaccctcgatttaccacacgccgaaccgcttccgcgtatatgctaataaaattctaaatctcctatagttagtcaatgaccttttgcaccgctttgcggtgctttcctggaagaacaaaatgagttatacaccgatgagtgatctcggacaacaagggttgttcgacatcactcggacactattgcagcagcccgatctggccagcctgtgtgaggctcttagccaactggtaaagcgttctgcgctcgccgacaacgcggctattgtgttgtggcaagcgcagactcaacgtgcgtcttattacgcgagccgtgaaaaagacacccccattaaatatgaagacgaaactgttctggcacacggtccggtacgcagcattttgagccgccctgatacgctgcattgcagttacgaagaattttgtgaaacctggccgcagctggacgcaggtgggctatacccaaaatttggtcactattgcctgatgccactggcggcggaagggcatatttttggtggctgtgaatttattcgttatgacgatcgcccctggagcgaaaaagagttcaatcgtctgcaaacatttacgcagatcgtttctgtcgtcaccgaacaaatccagagccgcgtcgttaacaatgtcgactatgagttgttatgccgggaacgcgataacttccgcatcctggtcgccatcaccaacgcggtgctttcccgcctggatatggacgaactggtcagcgaagtcgccaaagaaatccattactatttcgacattgacgatatcagtatcgtcttacgcagccaccgtaaaaacaaactcaacatctactccactcactatcttgataaacagcatcccgcccacgaacagagcgaagtcgatgaagccggaaccctcaccgaacgcgtgttcaaaagtaaagagatgctgctgatcaatctccacgagcgggacgatttagccccctatgaacgcatgttgttcgacacctggggcaaccagattcaaaccttgtgcctgttaccgctgatgtctggcgacaccatgctgggcgtgctgaaactggcgcaatgcgaagagaaagtgtttaccactaccaatctgaatttactgcgccagattgccgaacgtgtggcaatcgctgtcgataacgccctcgcctatcaggaaatccatcgtctgaaagaacggctggttgatgaaaacctcgccctgaccgagcagctcaacaatgttgatagtgaatttggcgagattattggccgcagcgaagccatgtacagcgtgcttaaacaagttgaaatggtggcgcaaagtgacagtaccgtgctgatcctcggtgaaactggcacgggtaaagagctgattgcccgtgcgatccataatctcagtgggcgtaataatcgccgcatggtcaaaatgaactgcgcggcgatgcctgccggattgctggaaagcgatctgtttggtcatgagcgtggggcttttaccggtgccagcgcccagcgtatcggtcgttttgaactggcggataaaagctccctgttcctcgacgaagtgggcgatatgccactggagttacagccgaagttgctgcgtgtattgcaggaacaggagtttgaacgtctcggcagcaacaaaatcattcagacggacgtgcgtctaatcgccgcgactaaccgcgatctgaaaaaaatggtcgccgaccgtgagttccgtagcgatctctattaccgcctgaacgtattcccgattcacctgccgccactacgcgagcgtccggaagatattccgctgctggcgaaagcctttaccttcaaaattgcccgtcgtctggggcgcaatatcgacagcattcctgccgagacgctgcgcaccttgagcaacatggagtggccgggtaacgtacgcgaactggaaaacgtcattgagcgcgcggtattgctaacacgcggtaacgtgctgcagctgagtttgccagatattgttttaccggaacctgaaacgccgcctgccgcaacggttgtcgccctggagggcgaagatgaatatcagttgattgtgcgcgtgctgaaagaaaccaacggcgtggttgccgggcctaaaggcgctgcgcaacgtctggggctgaaacgcacgaccctgctgagtcggatgaagcggctgggaattgataaaagcgcattgatttaactgcaaattgccggacagatctgcctgtccggcatattattcatgaggttttttcggacgatatttttccggcagttctggcaccggacgcttgtcatcgatgagatgacgcacggttaagatcggatgacgccacagcattctcggcccggcccaacgcataatctgtttcatctcttcacgctttgcaggctggtaacagtgcaccggacactgcttacaggctggtttctcttcgccgaacacacatttatccagccgcttttgcgcgtaaacaaacaacgcctcgtaatgctccggctccgcactcgcctgcgggcatttcgcttgataaagatcgatcatttttttaatcgtcagtttttcacgagagatacgcttgccggacatgctgcctccacctcattaagatgtatttatattacatcttaatcttaaagggcactatgactccaaagaagaagggttagccaaccgatacaattttgcgtacttgcttcataagcatcacgcaaaagctgcaaaacagcatctttcccggaaccagcatcaagaactcgccgttcgcttcttcccctgaaatgattaactccggtatcatgtgcgccttatgtgattacaacgaaaataaaaaccatcacaccccatttaatatcagggaaccggacataaccccatgagtgcaatagaaaatttcgacgcccatacgcccatgatgcagcagtatctcaggctgaaagcccagcatcccgagatcctgctgttttaccggatgggtgatttttatgaactgttttatgacgacgcaaaacgcgcgagccaactgctggatattagtctgaccaaacgcggtgctagcgcgggagagccgatcccgatggcggggattccctaccatgcggtggaaaactatctcgccaaactggtgaatcagggagagtccgttgccatctgcgaacaaattggcgatccggcgaccagcaaaggtccggttgagcgcaaagttgtgcgtatcgttacgccaggcaccatcagcgatgaagccctgttgcaggagcgtcaggacaacctgctggcggctatctggcaggacagcaaaggtttcggctacgcgacgctggatatcagttccgggcgttttcgcctgagcgaaccggctgaccgcgaaacgatggcggcagaactgcaacgcactaatcctgcggaactgctgtatgcagaagattttgctgaaatgagcttaattgaaggccgtcgcggcctgcgccgtcgcccgctgtgggagtttgaaatcgacaccgcgcgccagcagttgaatctgcaatttgggacccgcgatctggtcggttttggcgtcgagaacgcgccgcgcggactttgtgctgccggttgtctgttgcagtatgcgaaagatacccaacgtacgactctgccgcatattcgttccatcaccatggaacgtgagcaggacagcatcattatggatgccgcgacgcgtcgtaatctggaaatcacccagaacctggcgggtggtgcggaaaatacgctggcttctgtgctcgactgcaccgtcacgccgatgggcagccgtatgctgaaacgctggctgcatatgccagtgcgcgatacccgcgtgttgcttgagcgccagcaaactattggcgcattgcaggatttcaccgccgggctacagccggtactgcgtcaggtcggcgacctggaacgtattctggcacgtctggctttacgaactgctcgcccacgcgatctggcccgtatgcgccacgctttccagcaactgccggagctgcgtgcgcagttagaaactgtcgatagtgcaccggtacaggcgctacgtgagaagatgggcgagtttgccgagctgcgcgatctgctggagcgagcaatcatcgacacaccgccggtgctggtacgcgacggtggtgttatcgcaagcggctataacgaagagctggatgagtggcgcgcgctggctgacggcgcgaccgattatctggagcgtctggaagtccgcgagcgtgaacgtaccggcctggacacgctgaaagttggctttaatgcggtgcacggctactacattcaaatcagccgtgggcaaagccatctggcacccatcaactacatgcgtcgccagacgctgaaaaacgccgagcgctacatcattccagagctaaaagagtacgaagataaagttctcaccagtaaaggcaaagcactggcactggaaaaacagctttatgaagagctgttcgacctgctgttgccgcatctggaagcgttgcaacagagcgcgagcgcgctggcggaactcgacgtgctggttaacctggcggaacgggcctataccctgaactacacctgcccgaccttcattgataaaccgggcattcgcattaccgaaggtcgccatccggtagttgaacaagtactgaatgagccatttatcgccaacccgctgaatctgagcccgcagcgccgcatgttgatcatcaccggtccgaacatgggcggtaaaagtacctatatgcgccagaccgcactgattgcgctgatggcctacatcggcagctatgtaccggcacaaaaagtcgagattggacctatcgatcgcatctttacccgcgtaggcgcggcagatgacctggcgtccgggcgcagtacctttatggtggagatgactgaaaccgccaatattttacataacgccaccgaatacagtctggtgttaatggatgagatcgggcgtggaacgtccacctacgatggtctgagcctggcgtgggcgtgcgaggaaaatctggcgaataagattaaggcattgacgttatttgctacccactatttcgagctgacccagttaccggagaaaatggaaggcgtcgctaacgtgcatctcgatgcactggagcacggcgacaccattgcctttatgcacagcgtgcaggatggcgcggcgagcaaaagctacggcctggcggttgcagctctggcaggcgtgccaaaagaggttattaagcgcgcacggcaaaagctgcgtgagctggaaagcattagcccgaacgccgccgctacgcaagtggatggtacgcaaatgtctttgctgagtgtaccagaagaaactagccctgcggtcgaagctctggaaaatcttgatccggatagtctcaccccgcgtcaggcgctggagtggatttatcgcttgaagagcctggtgtaataacaattcccgatagtcttttgctatcgggaatattaacgacaactgacgaataaaataaaaacaccctgtataataggaaagcttattttacagggtaaaaccatgccatctacacgctatcaaaaaatcaatgcccatcactatcgccatatatgggtcgttggtgatattcatggtgaatatcagttattacaatcccgcttacatcaactctcttttttccccaaaatcgacttacttatttctgtcggcgataatattgatcgtggaccggagagtcttgacgtcctgcgcctgctaaaccaaccctggtttacgagcgttaaaggcaaccacgaagcgatggcgcttgaggcattcgaaactggcgatggcaatatgtggcttgccagcggtggtgactggtttttcgatttaaatgatagtgagcaacaagaggcaatagatctgttgctgaaattccatcaccttccacatattattgaaatcactaacgacaacataaaatatgccatcgcacatgcagattatccggggagtgaatatctctttggtaaagaaatagcggagagcgaattactctggcctgttgatcgtgtgcagaaaagccttaatggcgagttacaacaaataaacggcgctgattattttatatttggacatatgatgtttgataacattcagacgttcgctaaccagatttatattgataccggaagcccgaacagcgggcggctgagtttttataaaataaagtaatctcatgcttcttctgtgaagcatgagtaacccggtgttattgcaggccattattcatttttcgctaccagcaaagagagatcctgcttcaccagcgcgcgactggcactctccggcaaaccgtcgtctgtaataatctgatcaaactcgcttaatggtaacgccagccatgtcgccacctgaccatatttcgtcgcatcacagaccaaaactcgctggcggctggcactggcaatcgcccgtttcaccgtgactttatcttccgctggcgtagaaatcccccgcacactccaactgcttgcagaaataaaagcctgatcaatcatcaggctgcgcagcatggtcgcagcggcttccccgacacaggaacggttttcccgacacactgcaccgccagtgtgaataattgtgcaattactgttgtcgagcaagtagtccgcaataacgaaatcgtttgtgaccacagtcagactctccatgtgaatcagatgctgtgctatcgctaacgtggtcgttcccgcatccagatagatacaacttcccggctgaacaagacttgccgccagcttgccaatagccgctttttgcgtcattgccagcgcagtttttacctgatgagaaggttcatgcgccacgcgtcccggagactggacgcctccggacaccagcacaacggctccctgctgctccagtttttgtaaatcccgacgaatggtcatatgactcacattcattctgtccgttagttcagcaatactgacaatgcctttttcagctaccatctcaaggatgatttggcgacgctctacgggtatcaacttttgctccttcctttgtcctgcactcattctacgctatttgcctgcgaaacgtgcgcggcgcaactaacgcttagttcacataaaataacacacaatgttaatttatgtgaatcagatcaccataccgttatcttccagcgcttatattcacaatatcaaacaaaatatcacttaaattaacaaggagagcagatgaaaacgggatctgagtttcatgtcggtatcgttggcttagggagtatgggaatgggagcagcactgagttatgtccgcgcaggtctttctacctggggcgcagacctgaacagcaatgcctgcgctacgttgaaagaggcaggtgcttgcggggtttctgataacgccgcgacgtttgccgaaaaactggacgcactgctggtgctggtggtcaatgcggcccaggttaaacaggtgctgtttggtgaaacaggcgttgcacaacatctgaaacccggtacggcagtaatggtttcttccactatcgctagtgctgatgcgcaagaaattgctaccgctctggctggattcgatctggaaatgctggatgcgccagtttctggtggtgcagtaaaagccgctaacggtgaaatgactgtcatggcctccggtagcgatattgcctttgaacgactggcacccgtgctggaagccgttgccggaaaagtttatcgcataggtgcagaaccgggactaggtagcaccgtaaaaattattcaccagttgttagcgggcgtacatattgctgccggagccgaagcgatggcacttgcagcccgtgcggggatcccgctggatgtgatgtatgacgtcgtgaccaatgccgccggaaattcctggatgttcgaaaaccggatgcgtcatgtggtggatggcgattacaccccgcatagtgccgtcgatatttttgttaaggatcttggtctggttgccgatacagccaaagccctgcacttcccgctgccattggccagtacagcattgaatatgttcaccagcgccagtaacgcgggttacgggaaagaagacgatagcgcagttatcaagattttctctggcatcactctaccgggagcgaaaagttgagctaaactctaccgggagcgaaatcatgatcaagattggcgttatcgccgatgattttaccggcgcgacggatatcgccagttttctggtggaaaacggtctaccaacggtacaaattaacggtgttccaacaggtaaaatgccggaagcaatcgacgcactggtgatcagcctgaaaacgcgctcctgtccagtggttgaagccacacagcaaagcctggcggctctgagctggttgcaacagcaaggttgcaaacagatctatttcaaatactgctctactttcgacagtacggcgaaaggtaatattggcccggttaccgatgccttaatggatgctctcgacacgccgtttacggtcttctctccggccctgccggtcaacggacgtacggtttatcaggggtatttgttcgtaatgaatcaactgctggccgaatccgggatgcgccatcacccggtaaatcccatgaccgacagctatcttccccgtctggttgaagcgcaatccacagggcgctgcggcgtcgttagcgcacatgttttcgaacaaggtgtggatgccgttcgtcaagagctggctcgcttacagcaagagggctaccgctacgcggtgcttgatgcgctgaccgaacaccatctggaaattcagggagaagccttgcgcgatgccccactggtaacgggcggttctggtctggcgattggcctggcccggcagtgggcgcaagaaaacggtaaccaggctcgcaaagcagggcgtccgctcgctgggcgcggcgtagtgctctccggtagttgctctcaaatgaccaaccgccaggtagcacattaccgtcaaattgcaccagcccgtgaagttgatgtggcacgctgcctcagtattgaaactctggccgcttatgcacacgaactggcagagtgggttctgggccaggaaagtgtacttgctccactggtttttgccaccgccagcactgacgcattggcagcaattcaacagcaatacggtgcacaaaaagccagtcaggcagtagaaacactgttttctcaactagcggcgcggttagcagcggaaggcgtgacacgctttattgtcgcaggcggtgagacctccggcgtagtcacacagagcctgggaataaaagggtttcatattggcccaaccatttccccggcgtgccgtgggtaaacgcactggataagcctgtctcactcgcccttaaatctggcaacttcggtgatgacgcctttttttcacgagcccaaagagagtttttatcatgagcgatttcgcaaaagtagagcagtctttgcgagaggagatgacgcggattgccagtagtttctttcagcgcggctatgcaaccggtagcgctggcaatctgagcctgcttttacctgacgggaatttactggcgacaccgacaggtagttgcctgggcaatctcgatccgcagcggctttccaaagtcgccgcggatggcgaatggttaagtggtgacaaacccagcaaagaggtgctctttcatctggcgctgtatcgcaacaatccgcgctgtaaagcggtggtgcatttgcacagcacatggagcacggcgctttcctgcctgcaagggctggacagcagcaacgttattcgtccgttcacaccatacgtggtgatgcggatgggaaatgtcccgctggtgccttattaccgaccgggcgataaacgcatcgcacaggatctggcggaactggcagcagacaatcaggcttttttactggcaaatcatggcccagtggtttgcggtgaaagcctgcaagaagccgccaacaatatggaagagctggaggaaacggcaaagctgatttttattctcggtgaccgcccgatccgttatctgaccgcaggtgaaattgcggaattaaggagttaatgcaatgcctcgttttgcagctaatttatccatgatgttcaccgaagtgccttttattgaacgcttcgccgcagcgcgaaaagccgggttcgatgctgtggaatttctgtttccctataactactccaccctgcaaatccaaaagcaactggagcaaaaccatctgacactggcgctgttcaataccgctcccggagatattaatgcgggggaatggggattatccgcccttcccggacgtgagcacgaagcacacgcagacatcgacctggcactggaatatgcattggcgctcaattgtgaacaagtccatgtgatggcaggcgtcgtgcccgctggcgaagatgctgaacggtaccgggcagtatttatcgataatatccgctacgctgccgaccgctttgcgccacacggcaagcgaatattagttgaagcactcagccccggcgttaagcctcattatctcttctccagccagtatcaggcactggctattgttgaagaggttgcgcgagataacgtgtttattcaactagatacttttcatgcgcaaaaagtagatggcaacctgacgcatttaatccgcgactacgccgggaaatatgcgcacgtacaaattgccggactacctgatcgacatgaaccggacgatggagaaatcaactatccgtggctgttccgcctgttcgatgaggtgggatatcagggctggatcggttgtgaatataaacctcgtggcctcaccgaagaagggcttggctggtttgacgcctggcgctaattcgttaaatccctaattacaacgtacccatacatccccccatctacggatggggtaggttaactataactttcagacagggtttcccatgtccacaattacattgttatgcattgcgttagctggcgtaatcatgctgttgctgctggtcatcaaggcaaaggtacaaccattcgttgctttgctcctcgtcagcctgttagtcgcacttgcggcaggtataccggcgggcgaagtgggtaaagtgatgatcgccgggatgggcggtgtgcttggttccgtcactattattattggtctgggcgctatgctggggcgtatgatcgaacactctggtggtgcagagagtctggctaattatttcagtcgcaagttaggtgacaaacgaactatcgctgcgctgactctggcagcgttcttcctcggtattcccgtcttctttgatgtcggctttattattcttgcgccaatcatttacggttttgccaaggttgccaaaataagcccactcaaatttggcctgcctgtcgctgggatcatgctcactgttcacgtggcggtaccgccgcatccaggccctgtcgccgcagcggggttactccacgcagacatcggctggctaaccatcatcggtattgcgatttctattcccgtaggggttgttggctactttgcagcgaaaataatcaataagcgccaatatgcgatgagtgtagaagtactggaacagatgcaactggctccggccagtgaggaaggcgcgacaaaattaagcgataaaataaatccaccgggcgtcgcgctggtcaccagcctaattgttattcctatcgcgattatcatggcgggtacggtttccgcaacactgatgccgcctagccatcccctgcttggtacgctacagctgatcggcagtccaatggtagctctaatgattgcgctggtgctggcattctggttattggctttacgtcgcggctggagcttacaacacaccagcgacattatgggcagtgcgcttcctactgcggcggtagtgattttggttactggtgctggaggggtatttggcaaagtgctggtggaaagcggcgtcggcaaagcccttgccaacatgctacaaatgattgacctgcctctgttaccagccgcatttattattagtctggcgctgcgtgcaagccaggggagtgcaaccgtagcaatactgacaaccggcgggttactcagtgaagcggtgatgggattgaatccgattcagtgcgtattggtgacgctggcagcctgctttggtgggcttggtgcgagtcatattaatgacagtgggttctggattgtgaccaaatatctggggttgagcgtagcagacggtctgaaaacctggacagtgttaacgaccattctcggttttaccggactcttaattacctggtgcgtatgggcggtaatttgaccttaataaaaaggtccgatgggcatcggaccttttattgtgcacagaaaaggccagcctcgcttgagactggcctttctgacagatgcttacttactcgcggaacagcgcttcgatattcagcccctgcgtttgcaggatttcgcgcaaacggcgcaggccttcaacctgaatctggcgaacacgttcacgggtgaggccaatttcacgacctacatcttccagtgttgccgcttcgtaccccagcaaaccgaatcgacgtgccagcacttcacgctgtttggcgttcagctcgaacagccatttgacgatgctctgcttcatatcgtcatcttgcgtggtatcttccggaccgttctctttttcatcggccaggatgtccagcaacgctttttcggaatcaccacccagcggggtgtctacgctggtaatgcgctcgttaagacgaagcatacggctgacgtcatcaactggcttatccagttgctctgcgatctcttccgcacttgattcatggtccagcttatgggacaactcacgtgcggttcgcaggtaaacgttcagctcctttacgatgtgaatcggcaaacgaatagtacgggtttggttcataatcgcccgttcaatcgtctggcgaatccaccaggttgcgtatgtactgaagcggaaaccacgttccgggtcaaacttctctaccgcgcggatcagccccaggttgccctcttcgataaggtccagcaacgccagaccacgattgccataacggcgggcaatttttaccaccagacgcaagttactctcgatcatccggcggcgagaggcgacatctccacgcagtgcgcgacgcgcaaaataaacttcttcttcggccgttaacagtggactataaccaatctcaccaaggtaaagctgagtcgcgtccaacacacgctgtgtggctccctggcttaacagttcctcttcggccaaatcgttatcactgggttcctgttctactaaggccttttcgtcaaaaacctcaactccgttctcatcaaattccgcatcttcatttaaatcatgaactttcagcgtattctgactcataaggtggctcctacccgtgatcccttgacggaacattcaagcaaaagcctggttccgccgatttatcgctgcggcaaataacgcagcgggtttacggatttccccttgtaacgaatttcaaaatgcaagcgtgtactactggttccggtgctacccatggtcgctattttttgccccgccttaacttcttgttgttcccggaccagcattgtgtcgttatgggcgtaggcactcaggtaatcatcattatgtttgatgataatcagattaccgtagccgcgcagcgcgttaccagcataaacaacgcggccatctgcggtcgcgataattgcctgtcctttgctgcctgcgatatcaatccccttgttgcccccctcagaagcgccaaaggtttcgatcactttgccctcagtcggccagcgccaggtggagataggcgtactggtacttgtactgctgacagtcggctcggttgtgcttgctgttggtaccgttacaggcgctgtgaccgtggtcgcagttggcttgttgttcggcaacattttgttagcactctgttcaccgctagactcagaatacgtaattgtcggttggctcgcaacagcaacggtggaattttgtgcaggcttgatcacaactccttgctctgctgcgtcggcctgggtaatggcatttccgccagtgattggcgtaccggaagcattacccacctgcaaggtctgaccaacgttcagcgcgtatggtgcctgaatattgttgcgctgagcaaggtcacggaaatcgttgccagtaatccaggcgatatagaaaagtgtgtcgccttttttcacggtataggtactgccgctataactgcctttcggaatgttcccatactgacggttatagacgatgcgtccgttttccatctgtaccggctgctgagctactggctgcactggctggatttgcggttgttgagtagcctgaatttgtggctgctgcaccggctgaatttgcggttgctgcgctgtagacgtcgtccccattttcggcggcggcgtaatcaacataccagaattagtatttgcaggcgcattgccattaacggagctgaccggtgccggtggattactagtgtcagaacagcctgccagccataggctaaccagactcaaagccgcaatgcggcgaacggtgaattttgggcttcccgcgctcatttatcccccaggaaaaattggttaataaccagtgacataattaccgtgcaaggcaccctactgaacactggaaaagatgttcacgatacgctgacctgcggcaaaataaccaggaaaaatccaggtatttcctcacgttttaagccagctcacccttcactaaagggacaaagcgcacggcctccacggtatcgataataaattcgcctccccgacgacgcacccgtttcaaatactggtgctcctcccctacgggtaagacgagaatcccgccttcgtccagctgcgtcattagcgcagttggaatttccggcggtgccgccgtaacaatgatagcgtcaaacggcgcacgtgcctgccaaccttgccatccatcgccatgacgggtactaacattatgtaaatcaagatttttcaggcggcgacgtgcctgccactgcaagcctttaatccgttcaacgctgcaaacatgctggacaagatgcgccaggattgccgtttgatatccgctaccggtgccaatttccagcacccggctctgcggcgtcagctcgagtaattcggtcattcgcgccaccatatatggctggctaattgtctgcccctgacctatcggcaaagcgatattgtcccaggctttttgttcaaacgcttcatcaacgaatttttcacgcggcacggcggcaagtgcattcagcacctgctcatcctgaataccttgcgcacgtaattgatccagaagtgcttgtacgcgtctgcttaccattgcgtgccaactcccacgctgtttaaccagtcactaaccacatcttgcgcgctatgcgcagttaaatccacatgcagcggcgtgatggagacatagccctcatctaccgcagcaaaatcggtccccggaccagcatcacatttaccgcccggcgggccaatccagtacagcgtattgccgcgcggatcttgctgcgggatcacctgatctgccggatgtcgtgtaccgcagcgcgtcacgcgaatacctttgatttgatccaagggtaaatccggaacgttaatattaagaatacgcccggtgcgcagcggctctttacacagtgcgcgcaaaatactacaggttaccgccgcggcagtgtcgtaatgtttatgcccgtcaaggctgacggcaagcgccggaaaacctaaatgacggccttccatcgcggcggctaccgtaccggaataaataacatcatcccccagattcggcccggcgttaattccggacacaacaatgtccgggcgcggacgcatcagagcattcacgccaagatagacgcaatcggtcggggttcccatttgcacagcaatatcaccattttcaaaggtaaacgtgcgcagggaggattccagtgtcagagaattactagcgccgctgcggttacgatcgggggcgaccacctgaacgtcagcaaactcacgcaaggctttcgccagcgtttgtataccgggtgcatgtaccccgtcatcattactcagcaatatgcgcataatcacctgttgtgttgataagttccctgacaacgctggttgcaaaactacccgccggaagccagaaacggatctctacggtgacgtcatcccaccaattccagcttaattgttgcggatacagcagcatcgctctgcgcgcggcttcaactttttcgcgcaccagtaaagcttgtaattcagtttctgcggcgacagctgcttgttcgaatgccagcgcttcacgctgagttccccattcgccactgcctggcaatgcggcggttatcatcaactctttatcgttgacgcgacgctgtaattccgccagttcttcggtggttgcgacaaaccagctaccacgtccggctaattgtagcgcatcgccgtcaacaacttgattaacgtctgcttttttgaggcgctcagcaacaatctgattaaacaacgcactgcgggctgcgctcaaccaaaaactccgtttattgcgatcgcgcaccggagtattggtttgcgcccagcgctgcgccccctgcaagttgctaccgccaatcccaaaacgttgggcaccgaagtagttcggtacaccttttacgcaaatatcgatcagacgttgttcaacgtcatcgcgattgctcacttcgcgcagaaccagggtaaaggcgttacctttcagcgcgcctaaacgcagcttgcgcttgtgccgcgcatactccagcacctggcagccttccagttgaaaggcgctcagatcgggcatttccttgcccggcacgcgagcgcataaccactgttccgtaacagcatgtttgtctttttgcccagcgaagctgacttcacgggcatgaattttcaggaatttcgccagtgcatccgccacaaaacgggtattgcagccgtttttgaggattctaaccagaatatgctcaccttcaccatcaggctcaaagcccaaatcttccaccaccacaaagtcttccggattggctttcagcagcccggtgccttgcggtttaccgtggaggtaagtgagattatcaaactcaatcattttgttgccttaatgagtagcgccaccgcttcacaggcaatcccttccccacgtccggtaaatcccagtttttccgtagtagtggctttcacgttaacatcatccatatggcagccgagatcttcggcaataaacacgcgcatttgtggaatgtgcggcaacatcttcggtgcctgagcgatgatagtgacatcgacgttgccaagggtataacccttcgcctgaatacgacgccaggcttcgcgtagcagctcgcggctatcggcacctttaaatgccggatcggtatccgggaacagcttgccgatatcccccagcgccgccgcgccaagcaatgcatcggtcaacgcatggagcgccacgtcgccatcagaatgcgccagcaatcctttttcgtaaggaatgcgtacgccaccaatgataattgggccttcaccgccaaaggcatgtacgtcaaaaccgtgtccaattcgcattatgtattctcctgatggatggttcgggtgaggtaaaactcggccagtgccaaatcttccgggcgcgtgactttaatgttatccgcacggccttcgaccaactgaggatggaatccgcaatattccagcgcgctggcttcgtcggtaatagtcgcgccttcatttagagcgcgcgtcagacagtcatgtaacagctcacgagggaaaaattgcggcgtcagcgcgtgccataagccgttgcgatcaacggtatgagcaatggcatttttgcccggttcggcacgtttcatagtatcgcgcactggtgcggcgaggatcccccccgtgcggctggtttcgctcaacgccaacaatcgcgcgaggtcatcctgatgcaaacaaggacgagcggcgtcatgcaccaatacccactgcgcgtcgccagcggctttcagacctgccagcacggaatcggcacgctcatcaccgccatctacaacggtgatttgcggatgattcgccagaggaagttgtgcaaaacggctatcgccaggacttatggcaatgacgacacgtttcacccggggatgcgccagcagcgcatgcacgctgtgttcaagaatggtttgattaccgatactgagatattgcttaggacattccgtttgcattcgacggccaaatccggccgccggaaccacggcgcaaacatccaaatgagtggttgccatgttaattcccgggctgatttatcgattgttttgccccgcagactgtgcgcgcttgctcgcgtcaggcaccagacgataaaaagtttcgcccggcctggtcatgctgagttcattacgcgcacgctcttcgagcgcctcctggccgccattgagatcgtcaatttcggcaaaaagttgatcgtttcgcgctttaagtttcgcgtttgtagcttgctgtgccgccacatcatcattgacgcgggtatagtcatgtataccgttcttaccgaaccacaggctatactgtagccagaccagaatagccagcaacagcagcgttagtttacccatcctgccccctgaaaaacggcatcatcatcccatgcatccgaagacgactctacatcctctgttggggataccgcgacaacgcgggcaaatgtaccacatttgtccattgttacgtatacccagggcgtgcagaacataatctcattattagttacggtttgaattatgaacagaggagacgggaaagtacaaattagcccagtagccacataaacagtgcgccaaacataatgcctactgtcaccagggtgaaaacaatactgtagcgtagctttccgtccatcaaactatgcagcgcaatccccaccactaccgcgacgggcatcagcgccagaaagaaaggccaggtgtagataaagaagaacagcgtgttagagccataaatcaacatcggcatcgccagcgcaaataaccaggagataaaaccgaccacggcaccaggcagactccatgtggtttcttcatcctcagtaaggctgtcgttatttgttagtgtaatgttatggctattacgcatatttgatcctgttactttgacgaaccgggcatggaaacccggtggtgtctcaggatctgataatatcgttctgtctcaacagatctaataattgctgtaccaaatttgttactaattgttcaccattgagatgaatttctgcgctttcaggcgcttcgtaaacggaatctattcccgtaaagttgcgcagttcaccggcacgcgctttcttatataagcctttgggatcgcgggcttcgcaaatcgccagcggcgtatcgacaaacacttcgataaagcgcccttctcctacgcgttcgcgaaccatctggcgttcggcgcggtgtgggctgataaatgcggtcagcaccaccagtccggcttcaaccatcaaattcgccacttcaccgacgcgacggatattctctttacgatcggcatcgctaaaaccgagatcgctgcataatccgtggcgaacattgtcgccatccagcagatacgtactgacgccgagtttatgtaacgcctcctccagcgccccggcgaccgtacttttaccggacccggagaggccggtaaaccacagcactacaccacgatgaccgtggtgtagctcgcgttgttgcacagtgaccggatggctatgccagacgacgttttcgtcatgcagcgccattatttatcccccagcaaatcgcgcgcgccccagtgcggaaagtggcgacgaaccagagcattcaattccagttcgaatgcactgaattcagatggcgcagcagttgcctggctaactggctcgtgcaccataccggcacccacggtcacattgctcaggcgatcgataaaaatcagcccacccgtcaccggattttgttgataacgatctaacaccagcggctcgtcaaaagtgagatccacgaggccgatcccattcagtggcaggttttcaacttcacgctgggtaaggttattaatatcaacctgatagcgaatgccatcaacacgcgcgcgcgtcttcttaccggcaattttgatgtcgtaactctgccctggagaaagcggctgttccgccatccataccacatccacgctcgcgctctgcaccgccggtaacgcttcgtctgccgccagcagcagatcgccacggctgatgtcgatctcatccgtcagcaccagggtgatcgcttctccggcaaaggcttcttcgcgatcaccatcaaaagtcacgatccgcgcgacgttactttccacaccagagggcagcactttgacacgttgcccgacttccacgcgaccggatgccagcgttccggcgtaaccacgaaaatcgagattcgggcgattaacgtactgcaccgggaagcgcattggctgagcatccaccactcgctggatctccacggtttccagcacttcgagcagtgtcggaccgctgtaccacggcatactttcactttggcttgccacgttgtcgccttccagtgcagagagcggcacaaagcggatatccagattacccggcagctgcccggcaaaggtcaaataatcttcacgaatacgggtgaacgtctcttcactgtaatccaccagatccattttgttgatcgccacgaccagatgtttgatccccaacagtgtggagataaaactgtgacgacgggtttgatcgagcacgcctttacgggcatcgatcagtaagatcgccagttcacatgtgcttgcgccagtcgccatattgcgggtgtactgctcgtgccctggggtgtcggcgataataaatttacgcttctcggtagagaaatagcggtaggccacgtcaatggtgatgccctgttcgcgctcagcttgcaggccgtccaccagcagagccagatccagcttttcgccctgggtgccgtgacgcttactgtcgttatgcaggctactgagctgatcttcgtagatttggcgggtatcgtgcagcagacgaccaatcagagtacttttgccgtcatcgacgctaccacaggtcagaaaacgcagcaggcttttatgttgttgcgcaatcatccaggcttcgacgccgccttcattggcgatttgttgtgcaagtgcggtgttcatcttaaaaatacccctgacgttttttcagctccatagaccccgcctggtcgcggtcaatcacgcggccctgacgttcactggtggtggaaaccagcatctcttcgatgatttccggcagtgtttgtgcattactctccaccgcaccggtcagcggccagcagcccagcgtacggaaacgcaccatccgttttttaatcacttcgcccggttgcaggtcgatacggttgtcatcaatcatcatcaacataccgtcgcgttccagaaccggacgttccgcagcgagatatagcggaacaatgtcgatattttccagccagatgtattgccagatatcctgctcggtccagttagagagcgggaagacgcggatgctttcgcctttgttaatttgcccgttgtagttgtgccacagctccgggcgctgatttttcggatcccagcgatggaagcggtcacggaaagagtaaattcgctctttagcgcgggatttctcttcgtcacggcgcgcaccaccgaaggcggcatcaaaaccgtatttgttcagcgcctgtttcaggccttcagttttcataatatcggtatgtttcgcgctgccgtgcacgaatggattaatccccatcgccacgccttccgggtttttatgcaccagcagttcgcagccgtaggctttagcagtacgatcgcggaactcatacatctcgcggaatttccagccggtatcgacatgcagcaacgggaaaggcagcgtacctggataaaacgccttgcgcgccagatgcagcatgacgctggaatctttaccgatagagtagagcatcaccggattactgaattctgccgccacctcgcgaataatgtggatgctttccgcctccagttgccgcaggtgagtaagtcgtatttgatccataaccgttcctttgcaataccgctattttcttgccatcagatgtttcgactatagggagcgtaagagaacgaatgaaattaccaattagaatgagtagttccttaacggaataacgatttggcaaagctaatatcaaaaagtgcttaaggcaccggatttcgggcgtttaggaagatttgaaattgttttagcgcagcggcagtttcatactatggcggtaaaaaaatttgcatggtatttaaggactcactatgttttccgcattgcgccaccgtaccgctgccctggcgctcggcgtatgctttattctccccgtacacgccagcagtcctaaacctggcgattttgctaatactcaggcacgacatattgctactttctttccgggacgcatgaccggaactcctgcagaaatgttatctgccgattatattcgccaacagtttcagcaaatgggttatcgcagtgatattcggacatttaatagtcggtatatttataccgcccgcgataatcgtaagagctggcataacgtgacgggaagtacggtgattgccgctcatgaaggcaaagcgccgcagcagatcatcattatggcgcatctggatacttacgccccgctgagcgatgctgacgccgatgccaatctcggcgggctgacgttacaaggaatggatgataacgccgcaggtttaggtgtcatgctggaattggcagaacgcctgaaaaatacgcctaccgagtatggtattcgatttgtggcgaccagcggcgaagaggaagggaaattaggcgctgagaatttactcaagcggatgagtgacaccgaaaagaaaaatacgctgctggtgattaatctcgataacttaattgttggcgataaattgtatttcaacagcggtgtaaaaacccctgaggcagtaaggaaattaacgcgcgacagggcgctggcaattgcgcgcagtcacggaatagccgcaacgaccaatccgggtttgaataaaaattatccgaaaggcactgggtgttgtaatgacgcagaaatattcgacaaagcgggcattgctgtacttagcgtggaagcgactaactggaatcttgggaataaggatggttatcagcaacgcgcaaaaacacctgccttcccggcgggaaatagctggcatgacgtaagactggataatcaccaacatattgataaggctcttcctggaagaatagaacgtcgctgccgtgacgttatgcggataatgctacctctggtgaaggagttggcgaaggcgtcttgatgggtttgaaaatgggagctgggagttctaccgcagaggcgggggaactccaagtgatatccatcatcgcatccagtgcgcccggtttatccccgctgatgcggggaacaccagcgtcaggcgtgaaatctcaccgtcgttgccggtttatccctgctggcgcggggaactctcggttcaggcgttgcaaacctggctaccgggcggtttatccccgctaacgcggggaactcgtagtccatcattccacctatgtctgaactcccggtttatccccgctggcgcggggaactcccgggggataatgtttacggtcatgcgccccccggtttatccccgctggcgcggggaactctgcgtgagcgtatcgccgcgcgtctgcgaaagcggtttatccccgctggcgcggggaactctctaaaagtatacatttgttcttaaagcattttttcccataaaaacaacccaccaaccttaatgtaacatttccttattattaaagatcagctaattctttgttttcaaacaggtaaaaaagacaccaaccttaaaccatccaaatctaccggggtacgcctgtttaacccaaatgtctggaactcaaatcccgtttccgtattcgttgcccatgccatcactacattgccttcttccgccagtccagctatttgttcccagatcatttcacgaatttttgcggatacatcacctacatatacccctgcacgtacctccaacaaccagatggctaatctgcctcgtaagcgcggaggtacattttcagtgaccacgaccaacatactcatttcagctactccgatggcctgcatctcccagactaacaggaagcggaatggcaacaggctgtgcatcttcaggtggggccggcggttgtatttctccagcggcaagcacgtcctctataagcggaatcaatttggctaatgttttactactgcgaaaaatatccctgcacgccaaacggacttcccggtccggctcaccagggttacgacgcgctatctcaaaagctttcggtacaacagtgtcaaatttaatgatgtctgcaatatcgtaaacaaaggaaagaggctttcctgtatgcacaaacccaatagctggtgcataaccagctgcaagtatcgccgcttcagttacgccgtataaacaggaagttgcagcgctaatgcattggttgatcgtatcgcccttttcccagtctttcggatcgtagcgacgtccattccatgtcacgccgtattgcttcgccagaagtgcgtaggttgcccgcacgcgactgccttctatacctctgagttgctctacggagcgccgggcaggcgcaggttctccaaaccgaagttcaaacattttacgtacgaccttcagacgcaaatcttcatccagagcaagttttgcctgatagagcagcttatcactacgcgcacctccaggctgaccagaagcataaacacgaacgcccgcttcccccacccataccaacaatgttccaacttgcgcagccaggcgtacagctgcatggctaacccgtgtaccaggttccagcatgatgcaggcaacgctgccaacaggaatatgagtgcggatccctgtcttgtcgataagtacaaacgcgccatctattacatcgatctgcccatattgcagaaagatcatggagacgcgatctttgagtggaatgggattaaggggaagccaggtcattttattacacctcaatcacagtggagccaaagatagcaagccacatcccatgcttttagctggcccaataccttgctgtacaagatctattaacgctggcgcgtcgttgatggtgagcacaccttcaaagcaaaccgtttggatctttccacttttaccatcaccagaaaaatactgtggccgttcgcttatgggatgcacatcttcaacgcgcgccgcattgcccaatttacgttgcaaccacgcgatttgttctgcttcttttattaacggaacccgacagcgtttaatattccctttactgtccaggcgcttttgattgtcgagaatagttttgatcggatttgcccgaagccgaaaatagagtggaacaccaacctgaagttgaaattcaacctgtttagttttaatgactgtcgcaacggcagtactaacaggcatttgcgcactctgcaataaaacatgacagccttctggtgtgtttcgcttctcaacatgaaaaagaaaatcacgagcagcatccggtctgtttggaaataaatgccataatccctggtgaagttggtaaagatccctgctccaggccctggcaatgatgactttactgagatacatccatacctcctttaatcacataccattctcgggaagcaaattgtcgaggcaaggtgatcatcggttcgtcgcgcgccgtaaattttaaatgatgccctgtaacactttcctcactatatatatcgccgccaacgggctcataatttaatagcgccttctgaggatcgcttgcctgacatgtccccaaaaaaagcgggtgtgttagtgggcaacttctccgccccaggtaaggtgtataccgaggctttaatactgctttttcaagttcactgataaccatcgttgcatggggtgttaaccagagagcgacggtaaaggaggcatcacataaatattcgcgccatgtttgaatcgtttcatgacttttcaaaccacggtaatcttctcgcgctccaaggactgtatggtaatcacgcaaccccgttacagacacacgacgatcgtcaagaatgagttcatcgcagcgcactgcaaattgcacactctcacttaacgcctgtaaactagaagtatcatcacgttggatcccaagacaagccccgagtagccctaataacccgcttcgggtcggaaatcttccggtaggtcgcgttccttcaaaggtcggctgcccccaggcttgcattggcccagcaagccgcaagatcaaataagatctcatgttcacgcctcgccattattacgaacccaggattttaactgttctaaagtaggcatttgtttaacttgagcagtaattgggtctacatcagataagctgaattgcgcagcagctccgttcagaccatatccattggcaacgcgatcccaatattgattaaacgcctgtatagacggttgcaaaaagccatctttcgctttaaccgctttttcaaaagcatttgccatagaaagtggcatatcggagaaattaaccattaccatatccgcagggttaaaagcggcataagtacgctgttttgctccagggacctctgttgccagcatatgaacaacatgggttgcaatttccagagcctgctccctggaggcaccacctaaattttcctgaagttgagcgaggttaatgttggcataacgataaaaaacaccgctactaaattcctgagttcccagatgtgcagaaccttgttcctgtaaatcatctacagcggtgaaccagtcaatatcagaatcaacctgatgagtagtgatcgcatgcgcaatggacattgcaccatcaacttttcccaactcagtcatcatgccgctggttgccattcttccactaagcgcaatatcaacaccctgctgtaaattcacacgtatggcggcaatatcttccttaagaactttgagcagctttttatcatccagattatcagcctctgcttttgcaacctgctcacagaaccaggctatttctcccacaacccagggagtaaccgcatcggcagaaatcttttcggcttcatcaacacttttaccggagagcagcgctaatgtcttatcgatgattttttggtcaaaacgttcaccaagtttttgccgaagaacatcacgtaattgtgcaagatgaatggttctgagactggattcaccaatattttgtgcgtaataaccacttttacgcatcgcacgtttaaggctttgactactaattcttactcgtcttttgccgccgaaaatagcgtctttctgcatgttcatatcgtcgcggttcagacaactagggctgtgagagatcagaacatgaatattgataaagttagacatagaaaggtttccttacgcatttttgtttgtggtcaatacaaaatcttccagaagttgctggcgttcgcgctttccccaccaggtcaacatcctggccattaatggccagtcaagtacgggttcggcgtgagtaagtaatcgacgtaactggaccatatcggctgttctgtcagcccgaattaattgaaagatacggcgctcgttaattcttccactattggctaaagctcttcccaagctgatacctgttgtttgctcgctttttttgtcctgatgtcggatgacattctttcctgcgctcaggcaaaacaccatgcgcaaaagagcctgctggtgacgtgggttttcccaaccaaaaggttgcaccagcctataaaacgcagggatatcgcgtaattcatcaggttcactaacacgtctaatttgcgcacaacttccattatccagttgttgccaggctcgatataaagccattgcatcaatttcatcagccattacttggccctccttgcggttttaactcccgtaaatgtttgtatagcgtggcgcgggcaagcgctaatgtgcttattaatttaggatgatgtgcatagggagctacagattgattaaatagcatttcacacaattgatgaagtttgtctcgtaaatcagctattacctcatcagcctgggaaaaattaacattcgccagtacatcgggaattaataattcactctgtcgatagaaatgcctttctgcagtctcatgaacagagactccggcccctttgaagtctttatttttaaacccttctgcaaaggtatataacgccttgcgtaaggctgttttatatcccaaaccaacagtcactatttcgtttatcacattgccgtattgttgccacccctgattaaacatcaacacatcatgacgccgttcaagaatagatgcttgattattacgatatccccccataatcaattcaagaggactttgcggcgcaatatttctgaattgattcacaaccgccgccacgcgatttccattttcattttgaataatcttatctaccacaactcggctgatttgtgtccaacttggtgcggaggtggtgaaagcaagaaatttttcctcaacctcccctttcttgactgttaccagacaaggggaatgcggatggggccatagcccattaactgtaaaggtaaatttttccttaagaaaaccggtataacgcaaattgctttcctgtccacagcaagaacatttaccaatcccaatgggatcgcataattcaatatgcgctggttgccagaatagaccacggacaaacccaatactgctagcaggtatagactcattggacttgataggtttaatccaggtaggttggttttccgtatgactttcattaggaaattgtttttgaagacgaggtaatgtgaggacattgagtaacaccgtactacgaagatcgatcccacgtacgaacgttgttacaggtgttcctccacgtaaaccgcttttaaaaccaccaccaaaacctggtgcctgattcgcctggttgaataacgcaatcgcagtgcatccaccacataatgcttcaccctgccccggttgattgacaaatgcacaattcgtcgcgccgcttaccccagccaacagtttttccattggagtcacatcatttgctttgacacctttggtctgcataaagggatgttctgcgtgattaaggtagaacatatctatccacggcgcgatgagttgttgaaactcatcttcagtgagcggattcattatgcgatgtcgaaattcaacgtcatcttttgccggggcgataatttgcccaatgcaaaccagcagtgctaaagcggccagttccatatcgtcacggggcaaacttaatcgccactgatctctactgcagtataggctttgcagatttatgatttggactttccccccgtttcgcgggcgtacagggatccagttatcaataagcaaattcatttgttctccttcatatgctccgacatttctcctgcatttctatacgtcggcacacttccgttatcggtaaaaacaaagaaaaaatacggcgtaattaattcaataatcacattcactgcaaaaatatattcattggtttaatacaattaacctatacatatattaagatgtgttgaattgtttaaagacaataatgcatgcatttcaaatctgcaagttattcgttttattattaaagaaacttttagttataataattaccatgaattttattacataaaatattcatactgtgaatataaaatctcataccgggaaattaaaagaagatgtacattgtgcaccttccctacttaagtagggataaaccgttattggtcttattatcgtcattgataacaatcattcccgaagttatttgggatttgcagggatgactctggtcatcccttcatcccctgtataggtaataacaatactgttaccctgccagacccatccatccagattctgtttcccttccagccaaagtaacccatcttcatctactacttcagaaaaactacgtttccaggtgaagggtacattgacgcgattaagtgcaagcgcctcatactgctgttcatgacttaggtcctcgtagacctggccatcgagcagttgtttaccactagacgtttgtacataaggcaataatggcaggctcatttccccatccctcgttaccgcaagaatggtttcatcgttatcctgcaagctatattcttcagcccactgcaggaccttgcgagccttgaaccttttttcacactcggcgctttcaaatttatccatgccattgccgacccattctggctcatccatttccgcatcatcgtaaatgctatccagccattgccggtaagcatcagggaaaaataaggatgctccattaagcccctcaatatgttgctgcgtccgccacatgactctaacgttgctataaatatgctcatgtcgtccgtaaccctcgccatcaggcagcaaaatggtggcaacaggaatctcaaaaccagcgggacgatatttgcgatgatggcgatgtaaacggcccaatcgttggaaaagcaaatctgcaggacaatgctgagtaattaaccaatcaaaatcaacgtcgagactttgttccacgacctgggttgcgacaagtatccgtccaacatttcgcttcccatttttgccgaaattgctaataactcgattctctttttcacgacgatcgttcagcgtaaagcgcgcatgaaacaaatctatatctacttgcgtgttatttagctcctttagccgttggtagcatacttgtgcaacgtcaaccaaattgcaaataagacagacctgtgcacccgcgtttgccgctgcgatcattcgctctaacatcgtaaggtcaggtaacatgtcagctaaacaaataggttctggctgaatgctaaagcggggcgggagttgttctggatgagctagcagatcaaaacgttgcgcaccattcacacctcgccagttaatgagtggatatgcggagttattttccactggatctgtatgcagaccataagtatccagaagtttctgtttttgtttcattggtagggttgcggaaagaagaataacactccctcccacatcagcctgagccttgagcactgcctccagcaagccgttcatataggtgtcgtaagcatgaacttcatcaacaattaaaacacttcgaccaattcccaaaccacggataaagcggtgtttaactggcaatacgcttatcaacacctgatcaatcgtgcaaacgccgatttgcccaagaaacactttcttattgctttgactcaaccactgacaacactgaacccacgcttcttcttgcccctgttcagtaatcgcgcgactttttatactttgaaagaggtggttaaaccgactattgccatgagcaagaataagatttggggaactaaataagtggctcgcgctcgcttccattctcgtaagcatagcattcgcggtagcttgtgttgggagggcaaaaataacactatccgcaatttgttgatcaataagtttccaagcataggccagcgctgtttccgttttaccggagcctgtaggtgcctctattaccgtcagcccgggagctactggaagagcatcaactaacacctgtaattgtctgggttgatagccattgtccagtagtgcatgaacaccttcataacatcgcttattacttacaagtccactcaactccaatacccggctcgcatcctgctgtcggtcctggaaatacgttctcagagcatttatgtcggaaggcgcatcctcattaaacagaaaggtattcgttgtagtccaggagcctaaccagtcagcaaggctgcaaaaacctgctaacagactactacaatcaggtggtatatcgtttatagataaccccgctggcgttaaaaataatgcttccagtacagatatccactcctcacgagcctgtttatcttgcgcagcataagatgccagagaagctggcatttcccaacggctcttatcttgatcctgggaatgtaatataaaaccatgatgtcctgtaacggcctctacccatggaaaccaggactcataaggatgaggagcggcatcaaaaaaactgaaaaaatccccgagagattgctcactaagactatcctggttaaaccaatacagaccggctgcaccatgattaaatttacggcacatttgtgtacttggaccattaagacttggcgttgcaggatttaatttcagccaactttctgcacttttatattggaatcgtatatcaaactttccaatatcatgaagagcaatgaaaaataacagccaggccttcaccctctgtttacttagcatttcatttcggcaaaaagtattttgcagtacgacactttgatcccaccagcaatctgcaacagcagcaacatcaaggcaatgataaattaacagatgaatatcatttcctttcgtcaagcttttactggattttccccagtaatggcatatatatttaaaaggttccattaatagcctccctgtttttttagtattatcgatgatatcagcgggctatttttcgatgctgctcataaatatcgaattacagtgatatacacatgtcttgcctccctgcaaagaagagactaacattcgaattgtttgggttcgaacgctggcctcaggttgatagaaatatcgcctggggcttttgtccatctggaacctcgcgaatgcttaacgccagacagcctcaagcacccgacgccattctatacctgataattcttcccgcggcgttcacgtttaaaatcaggaatgctgctcgcaaaataaaaacgcccccatcatttctgacagaggcgtttaatttgtccggcaatatttacccttcgtgtaacccacattccctttttaagccaaagaaacgcgtttcttcttccgccatgccgggttcccatttacgggttgtatgggtatcgcccacgcttaaatatccttcatcccataatgggtgatatttcaggccatgtttttgcaggtactgataaatagttcggttatcccagtcgataatcggcagcactttaaatacgccacgctgaattgccagcaccggtaaattggcacgactgccggattgttcacggcgcaggccagcaaaccaggtttgcgcattcagttctttcagagcccggttcatcggttcgactttgttgatgtcattgtacttttcaatgccttcaacgccctgctcccacagttttccgtagcgtgcttcctgccaggctgcgctttcggtagcacggtacactttcaggttgagcttgagtttgtccgttaactcgtcaataaagcggtaggtttccgggaacaagtaacccgtatcggtgaggatcaccggaatatccgggcgaatttgattcaccagatgcaggctcaccgccgcctgaatgccaaagctggaagaaagtacatattcaccgggcagattatccagcgcccaggctacgcggccttcagcgtccagtttttccagttcggcgttagtttccgccagcgccagaatgcgatctaccttcggcagttcgttcagggcgtttagatcgagtttggacatagattcctcactgtttgccttgcctgatgcgacgctcacgcgttcttatcaggcctacaagaccgggctgatggttaatcccacaaatcacgcgccggatcgagcaccgggcgaatgatgcccgcacgcaccgtaaagtcgccgaagccttcacccgcttcgcgctctttcgcccagcgccctatcagttcatcaaggctcgccaggatttccggctcggtgatgttttctttatacatccgtgggatacgtgtcccaatgcggttgccgccaagatgcaggttgtagcgacccggcgctttacccaccaggcccacttccgccagcatcgcgcgaccacaaccgttcgggcagcctgttacacgcatcacgatatgctcatcgctgacaccatgtttcgccattaaattatcgatgttgtcgataaaagacggcaggaaacgctctgcttccgccatcgccagcgggcaagtcgggaaactcacgcaagccatgctgttttcacgctgcggcgtgacggcattcattaacccgctctctttggcgatcttctcgatcttcgctttctcgctttccggtacaccggcgatgatcagattctggttcgccgtaatgcggaaatcgcctttgtggatcttcgcgatctccagcaggccggttttcagcggacgcgccggataatcaaggatgcgaccattttcgataaacagcgtcaggtgccagttatcatcaatgcccttaacccagccaatacgatcgcctcgtccggtgaactcatatggacggatcggttcaaatttgatccccgcgcgacgctccacttccgctttaaacgtctcaacccccacgcgctccagcgtgtatttggttttggcatttttacgatcggttcggttaccccagtcacgctgagttgtcacgacggcttcggccaccgccagcgtatgctccagcggcagatagccaaactcactcgcggtgcgggcgtaggttttcttgttgccgtgttcgatggaaagcccaccgcccaccaacaggttaaagcccaccagcttgccgttttcggcgatcgccacgaagttcatgtcgttggcgtgcagatcgatatcgttctgtggcgggatcactaccgtggttttgaatttacgcggcaggtaggtctggccgaggatcggttcttcatcagtagtggcgactttttcctggtcgagccagatctccgcatacgcgcgggtacgaggcaacagatgctcagaaatcttcttcgcccactcgtacgcttccgcgtgcagctggctctcgtaagggttgctggtgcagagtacgttacggttcatgtcgttagctgtcgccagcgcatcaagaccgacgctgtgcagcatctggtgcaccggtttgacgttctttttcagaatgccgtggaactgaaacgtctggcggttggtcaggcgaatgctgccatagatggtgttttcaccggcaaatttgtcgatcgcctgccactgtttagtggtaatcaccccacccggcagacgacagcgaagcagcatcgcgtggcgcggctccagcttctgttcagcacgttcggcgcggatgtcgcggtcatcctgctgatacatgccgtggaagcgaatcagcaggaagttgtcgcccttaaagccgccggtcagaccgtcgtttaaatcttccgcaatggtgccgcgcaggtagttgctttcatgcttcatgcgctcggcgtctgtcagttttccttcgaccactaaaggccctggatgtttttcgctcattagtagacatctcgctgataacggcgctctacgcgcagctcacttaaaaattcatccgccgcttcggtgtccatgccaccaaattcggcaatcacttccagaagtgcctgctcaacgtctttcgccatgcgattagcgtcgccgcagacataaatgtgggcaccatcattgatccagcgccacagctccgcgccctgttcgcgcagtttgtcttgtacgtaaactttttctttttgatcgcggctccaggcaagatcgatacgtgtcagcacgccatctttgacgtagcgctgccactccacctggtacaggaagtcttccgtaaagtgcggattaccaaagaacagccagtttttacctggcgcttcgtcggcggcgcgttgctgcataaaggcgcggaacggcgcaataccggtgcctgggccaatcataatcaccggggtttctggattggctggcaggcggaagttatcgttatgttcgataaatacgcggacttcgccctcttcttccacgcggtcagcgaggaagctggaggcaccaccggcacgggcgcggccttccacgtcgtaacgcaccacaccaacggtgacgtgtacttcgttctcgacttccgcctggctggaggcgatggaatacagacgcggcgtcagcgggcgcagcagattaattagcgcttcggcatcaagctgtgccggggagaaacgcaccatgtcaacaatcggcgtcgtcgcggcgtaatgctgtaacttcgctttatcgcccaccagcggcagcagtgtttcactgcgggtaagcgtggcgtaattctcaacaatgttggcggtgttgacggtcagttcgaagtgccactgtagcgcttcgttcagaggcaacgttttgccctcgacggtgacaggttcatcgcctttcagccacagcagttcgacaagttctttcaccagtgccggatcgttctgataccagacgcccagcgcgtcacccggctggtaacgcatgccgctgtcacctaagtcaatttcgatatggcgaacgtctttttcagagttacgcccggtaattttctggttaacagagaggctagccaccagcggcgcgtctttgctgtacgggctggtgtggatttcatttaccgcgccagtagcgacggattggctaggtgccgcgacaggcgcacggcttttaagcgcatcaaccacgcgggcgcgccactcgctggcagcagcctggtattcaacatcggcatcgacacggtcgagcaggcgttcaccacccagttccgccagcttgctgtcgaaatctttcccggactggcagaaaaattcataagagctatcgccgaggctaaacacggcaaacgcggtgttttccagctttggcgcttttttggagaacaggaacttatgcagcgcgacggcttcttccggcggttccccttccccttgcgtactcgtcactacgatgagcagtttttcgctggcgatttgtttgaatttatagtcgcccgcgttcaccagcttaacgttcagttttgctgctaataaatcatcacgtaatgcttcagcaacccggcgcgcattgccggtttggctggcggagataatagttatacccggcatttctgcggctggcgctggcgtcgctgcaagcgcagcaggctgctgattgagtacgccccagaaatagccagaaacccaggcaagctgggtgggagttaaatcggtcgtggccgcctgaaggcgtgccagttgctccgggttcaacggaagcaacgcggaaggtgggacctgtgtcgtcatgcgtcgttatgttccagtaagcaaagctgtttctgcgccctgtcagcgcccataaaacagaagagaaggtaaggttaacggggcaaacggtgtggattaaagacgggatagcgataactaataaccaaatcgactaacctgttttagcaatagtctttaacaacaaaatagattaaccaacctaatgaaaaacaaatgaatttagccaatcattaagataaatcagcgattttgcgcaacaaagtcgttttagataatgcgaaaaaacagcctttccggtactctacggcggttttatcgtcctgtagagaaattatgatgtccaccacgttatttaaagatttcaccttcgaagccgctcaccgcttaccacacgtcccggaagggcataaatgtggtcgcctgcacgggcattcctttatggtgcgactggaaattaccggggaagtcgatccgcatacgggctggattatcgatttcgctgaactaaaagcggcgtttaaaccaacctacgagcgcctcgatcaccattatctcaatgatattccaggtctggaaaacccaaccagcgaggttttagcaaaatggatttgggatcaggttaaacccgttgtgccgctgttaagtgcggtgatggtaaaagaaacctgcaccgcaggttgtatctatcgcggcgaatgataagagtgtgtcggcggtcaatttcccttaagtaacgctatgttagggtgttgtgttctggatatctggggcatgacatggaagacgactgcgacattattattattggtgccggtattgcaggcaccgcttgcgcgttacgctgcgcgcgagcgggtttatccgttttgttactggaacgcgctgaaatccccggcagcaaaaatctttccggcgggcggttatatacccatgcactcgcggaactcctcccgcaatttcatctgaccgcgcctcttgaacgacgcatcactcacgaaagcctttccctgttaacgcccgatggcgtaacgacgttttccagcttacagcccggcggtgaatcctggagtgtattacgtgcacgattcgatccgtggctggttgccgaagccgaaaaagaaggtgtcgaatgcatccccggagcgacggtggatgcactgtatgaagaaaacggcagagtctgtggcgttatttgtggtgacgatattctccgcgcccgttatgtggtgctggcagaaggtgccaacagcgtcctggctgaacgtcacgggttagtgactcgtcctgctggcgaagcgatggcgttggggatcaaagaagtgctgagcctggaaacatccgctattgaagaacgttttcatctggagaataacgaaggcgcagcgttgctgttcagcggcaggatctgtgatgacttacccggcggcgcatttctttatactaatcaacaaacgctcagcttagggattgtttgcccgctctcttcccttacgcaaagtcgtgttccggcaagcgagctgctgactcgctttaaagcgcatccggcagtgcgcccgcttatcaaaaacacggaaagtctggagtatggtgcgcatctggtgccagaaggtggcttgcacagtatgccggtgcaatacgccggtaacggctggctgctggtgggcgatgcgttgcgcagttgcgtcaataccggaatttccgtgcgcggcatggatatggcgctgactggcgcgcaggcggcggcacaaacgctgataagcgcctgccagcaccgcgagccgcaaaatctgtttccgctttatcatcacaacgtagagcgcagcctgctgtgggatgttctacagcgttatcagcatgttccggcgcttttgcaacgcccgggatggtaccgtacgtggcctgcgttaatgcaggatatttcccgcgatttatgggatcagggtgataaacctgttccaccgctgcgccagttattctggcatcatttacgtcgtcacggcctgtggcatctggcgggcgatgttatcaggagtctgcgatgtctgtaacgtaagatgttatcaggagtctgcgatgtctgtagcccgtaatctctggcgcgttgctgatgcgccgcacattgttccggctgactccgttgagcgccagacggcagaacggttgattaacgcctgtccggcaggtctttttagcctcacaccggaaggtaacttacgtattgactatcgcagttgcctggagtgtggcacctgccgtttgctgtgcgacgaaagtacactacaacagtggcgctatccgccttccggattcggcatcacctaccgctttggataaataataaggataatttatgcccctcttacacctgctccgccagaatccggtgattgctgccgttaaagataatgccagcctgcaactggcaatcgattctgaatgccaatttatttccgtgttgtacggcaatatctgcaccatcagtaatatcgttaaaaagattaagaacgccgggaaatatgcttttattcatgttgatttgctggaaggcgcgagtaataaagaagtcgttattcagtttttgaaactggtgaccgaggcggacggcattatcagtaccaaagccagtatgttgaaagcggcaagagcggaaggttttttctgtattcatcgcctgtttattgttgatagtattagctttcacaacattgataagcaagttgcgcaaagcaatccggattgtattgagatcctgccaggctgtatgcccaaagtgctgggctgggtgacagagaaaatccgccaaccgctgattgccggtgggctggtgtgcgatgaagaagatgcgcgtaatgcgattaacgcgggtgtcgtggcgctttccaccacgaataccggggtctggacgttagcgaaaaaattactttgacgggataatcgtaaccaattgaatttggtttgatttgtaggccgcacgccacatccgacattcagcgcctgatgcgacgcttgacgcgtcttatcaggcctacaagtccccaggccagaaccgtaggcaggatcatccggcaacacgttattggcaatctgcgtgaatgtttgtcaccagtgcctccagcaccactttccagtcatcaaccacgccaacatctgcctgactaaataccgcagcgctggcgtcatgattaatcgccaccacaaacttgctattgcgtacgcccgccattaacgctgctgcgccagaagcgccaacaacaatacacacctcaggtgccagcagatgtccggaaataccaatcactttttcagcatcaacgccaccgttcatcactcgcgcccgactgtagcccacttcggctcccagcttttctgccagcatagcgatttcctggttatctgcctctccgccctgccccaccaccagcacccgtctggcctcagctaatgggtcgcgggtaacatttttcagatcctctgtgctaaccagccagtccggaagcgcacccgggacaatgttcagttgttgcattccagagggcaacgtggcgtttttcgctgctcccgcctgacgcgccagggaaaggcatagcgggcgtttttctgtttgcagcgtcgccgttagcgcatttccccagtgggatttgcgcacgcttacggttggaatatctaagctagtcacctggcagatgcttgcaccatgtaaacgccaggccagccgggtgctcagttcatcgccaaacgttcccggcggaaagagaacaacgtccgcaggcgttcgctgccactgttccaccaacgcatccagcacctgttccgccactacaggctgaggttcaatctgccagtgcgccagggtacaaccgctgaaatcctgcgccgccagccagcttgctattgcggcattctcctgatttattgtcacaattgcgatattcatggctgcatcctttggcgtaaatagtcctgccatagcttttgagctttttctgctaccgtttgcccatcaatcagcgtcgctccgcgtcgttgctctgctcttgccagttgcagacactgcatcgctggcatttcggcagcaacagttttacggataatttctgctttccccgcagccattcgctggcgcattcccggtactggcaaggccacttcaccgcactgacgcacggcaatcaccgcaggcaagcgaacccggcaacaacgcaacccatgttcagtacgctgttcgagggtgataaacagcgcgtcgagagtgaaacgctccacctgggtgaagcagggccagcccagcatttccgccagcaaaaatggcgtttgcccattctgcccttcgctgctttggcagccggtaattatcagatccagcggattctgatgctgccattcggcaatatggcgagcgacaaattccggcgcaaagcgcagatctgccgccgtctccagcaatacagcttcctcaaacccaagagccatgagatagcgcagccagtgcaatgcccgttcatcccccatgctcaacgcggttaaagacatcggcgtaccgttttttctctgcgccaacagcagcgcggcagcggcctgttcatcagcaccgagtaaacttcgcagtaggctaatatccggtccgcttttaccctgagccgccgcctgccactctttttccgccagcattccggcatccggttcggctttaaacgctaacagaatgttcattcgcacctcctacatttcccgccgccaccagcgggagggctttagtttctggtgcccatagccaggtcacaacaaaaccaaccaacaacactgtcgccaggagcaataaggtgacttgcattccccactgcgccagcacccacggcagcaggccagtacttaccgccgcgccaagtcgactcatggcagtggcaaaaccgacgcccaggctgcgaatgtcagtaggaaaactttccgcaggcaaaatgcccaccagattactgactgcgctaatggtggtgctgaagagaacaaaaagcagcagcgttaaactactgccggaaggcaaacaggccatgactaccagcgttgccgccagcagcaaaaaacttcccagcaaaaatttgcgatgtgccagcaggtgcgtcagaactaatcccagcagcgcgcccacaattaacaacgcattaagcatcaggctggcagtcagcgcatcttccagaccaatagtctgggcgatagttggcagccaggtataaatcacaaaccatgggattacgaggcagacaaagaagacgctgttaaacgccgtgcgccgccagtaacggctagagaacaaggttttgatgtgtttatgggtcgccgttaccacttcatcgcccagtaaaacatggggaccaaaatagcgatgcacgatagcgtgagcttctgcaaaacgcccctggcgcagtagccagcgtggactttctggcgttccccagcgtaataacgtaatcaacaacgcgggcagagctgcgcttgccagtagccagcgccaggcctccgggttttcggaaataaagtgatgtccggcaatacttgccagcacatagcctacggtccacaccacgctgaatgcgcccagcaaaataccgcgatggcggcgcggggaaaattcagccagcaaggtgtgacctacactataatcgcctcccagaccaatgccaatcaaaatgcgcagtccaataagatgctctggcgtggtggcaaaaaattgtaaaaagctagcaagcgtaatcagcaaaaagctgaaggtgaagattttttgccgaccaatatggtcggagatccacccaagaaccaggctgccaaggaacaaaccaaggagcgcgctgccgccgatcattcccgccataaacggcgtcagttgcatggcgggcgtaagctgaataatggcgtaaccaatgacgccgagaacataaccgtcggtcaggtgtgcgccgaaagtgagcgcagcaatgcggcagtgaaaacggttaagcggtaaatcatccattcgcaccggactagtgttcatctttaccccttcattgtccggtaataagaacggcttctcgcctgagaagccgaaaaggcaacgccccgtcatcgcggaacgctgcctgacacattatttttcaatcggatagatagtacccgtattcataatgccattaggatcgaactgctttttcagcccttccagcaacgcccacgcgctgccgtgttccagtttgctccagtgaacgcgatgtttaccgataccgtggtggtgcaccatgctaccgccgaggcgaatggtttcttcacagatgatcttgttgagcggattgtggtacttgtcgatttcctcttccggcttacagtcaacgacgttgtaatcgtagacgaagtacatgttggtgccgttctgatagctatgagaggaatgaccgcccagcatggtgatgtcgtcggcgtgcgggaactcagtacgaatacggttaataacgctttcgtagatttcgtggatgcagctccagcagccggatacttcggtggtaaagcccatgttgccggttttgaggatctgcacacgttcggcagccactttatccggtccccagttcaggttgttaaaccaggtttcgatcagcttgctgtccacgcgctggcattgcgggtagcgggcaacgatttccgcaatcccttcgcccgtcaccttcgcaatgcgagggttaccttcagccataaagatcagcacgcattttccgtcggcaaaatgggtgaagtgttgggtgccatcttcagcgtcatacaaacgagcgatactcggacgatacccttccaccatgatttcacgcaggatgttgaagccggttttcatgtcttccaggatatagccgtagaagaggttgttttccggggtgaatttaaagattttcactgttacttcagtgatatagcacaatgcaccttcgttgccgatgatgatgtgacgaatgtccgggccagccgcgcggcgtggcacgtttttaatgcgtgtgacggtgccatcagccaatactgcttccagaccaacgaccatatcttcgattgcgccgtagagtgtggagaactgcccgatacttcgggttgctaccaggccgcccatctgcgccagcggcttactctgcggagaatgccccgtggtgtaacctttttcacgcaacgcgttttccagcacttccagcggaacaccacattgcgccgtcgcctgcatattctcaatatcaatattaatgatttgattcatggcggagccgtcgagcaccacgctgttttctacaacagtttccagcccaccttcggtggcggaagcaccggtacgcggcacaccgttaattttgtgcgcattcataaaattcagcacacgggatacttgctctgtggaaccgagttttacgaccgctgccggaatcggcaaagtataaatgccatgaatatccggaaatttacgaaaacggtcaatactgtttttctttaatactgtttcatcggtaattacgcgatctgcaccaacaatttcctttagctggtcgacaatcgctgcgcgagataaagacatagtaattccttcctgataataaaaatggaataatcattaataagagaaaacagaaaccaccgttatgggttagcgcactaaataaccgccatcaaccactaataaatgcccgttgacataattgcttgccggacttgcgaggaatacggctgcgcccattaaatcctgagtatcgccccaacggtttgccggaatatgatcaagaacgcgctgattggtttctggattactgcgtgtcgccagcgtaatatctgttgcataatagccaggggcgataccatttacctgaatattatattgacctagttcatcacaataagctttggtgaacccggcaagagcatgtttagtggcagaatatgcaggactccattgtccacctaagtaagagaacaaactacagatattaataattttgccgcttttctgcgggatcataatttttgcagcttcatagcttaactcgaatgcggcggtcaggttcacatcaatcatcggatcccagtcggcacgaccgaagtccagcaccttattcagcttacaaataccggcattgttaaccagaatatcaactgtaccgaaacgctcacagcaagcagcgataatcttctgcggcgcgccttctgcggtgatacccacctgcatgaagtccacctcaacaccctgtttttcaatcatttcctttgtttcgccgttatctttgacgaaactaggaataaagatatttgcgccagctttggccaacgccatggcaaatgcctggcctaaaccgctattcccaccggtaacaattgcggttttacctttcagggagaaaaaatccatactgaacgcattgagagattcgatactcatagttagctccaatttccgtaaggcaaaaaaaaagaaaggtaacttcccccgcgagagggaagttacctttctcattatctctggtaactggagataatttttagcataagggcataactgctaatgtgatcgtaatcacagtgtgatattcgtattgtcaaataattttaaaaagcagaagcgtgattactctcacacaacacctctgctttccatgttatttattatttcaattactagagacctgagaaaagtaatccacctgaaagggcggcttacttttctcttttttttgtctattacaaatgggaatacgatatgcaacacaacagttatcgccgttggataaccctcgcgataattagttttagcggcggcgttagtttcgacctggcttatttacgttatatttatcaaattcccatggcgaaatttatgggattcagcaataccgagataggtttaataatgagtacctttggtattgcggccattattctttatgcccccagcggcgttattgccgataaatttagtcaccgcaaaatgattacttccgcgatgatcattaccggattactgggtctgttaatggcaacgtatccaccgctgtgggtaatgctctgtattcagatcgcctttgcgataacgacgattttaatgctgtggagcgtgagcattaaagctgcaagcttgcttggcgatcatagcgagcaagggaaaattatgggctggatggaagggctgcgcggcgtcggtgtaatgagcctggcggtgtttaccatgtgggtcttttctcgctttgcaccggatgacagcaccagcctgaaaacggtcattatcatctatagtgtggtttacatcttgttggggattctgtgctggttttttgttagcgataacaacaacctgcgcagtgccaataacgaagaaaaacagagtttccagcttagcgacatcctggccgttttgcgtatcagcaccacctggtattgcagcatggtgatttttggcgtcttcaccatctacgccattctgagttactccaccaactatctgaccgaaatgtatggcatgagcctggtggcggcgagctacatggggattgtgatcaacaaaatattccgcgcgctgtgcggcccacttggcggcataatcaccacctacagcaaagtgaaatcccctacccgcgtgatccaaatcctttccgtactcggcctgctgacgttaactgccctgctcgtcacgaactctaacccgcaaagcgtcgcgatggggattggcctgattttactgctgggattcacctgttacgccagtcgcgggctgtactgggcctgccctggcgaagcgagaacaccgtcttacattatgggcaccacggtaggtatttgtagcgtgattggattcctgccggatgtcttcgtttacccaattatcggccactggcaagacaccctgcccgctgcagaagcctaccgcaatatgtggctgatgggcatggcggcgcttggcatggtgattgtctttacctttttgctgttccaaaaaattcgtactgctgatagcgcccccgcaatggctagcagcaagtaagccaggaaaattacaggagaaaaatcatgagcaaaaaatacatcatagggattgatggcggaagtcagagcacaaaagtggtgatgtacgatctggaaggtaacgtggtttgcgaaggcaaaggcttattacagccgatgcacacgccagatgccgatactgcagaacatcctgacgacgatttatgggcaagtttatgttttgccggtcacgatttgatgagtcagtttgccgggaataaagaagatattgtcggtattggtctgggatccatccgttgctgccgtgcgttattgaaagccgatggcacgcctgctgcgccgttgattagctggcaggatgcacgcgttacacgcccttacgaacacactaaccctgacgtggcatatgtcacctcttttagcggttatctgacgcatcgcttaaccggcgagtttaaagacaatatcgccaactattttggtcagtggccggtggattataagagctgggcatggagcgaagatgctgcggtaatggataagtttaatatcccccgtcatatgctgtttgatgtgcaaatgcctggcaccgtcctcggacatatcacaccacaagccgcactggcgacacatttcccggcaggactgccggttgtttgtaccaccagtgataaaccggtagaagctctgggggccggattactggatgatgaaacggcggtaatttctcttggcacttacatcgcattgatgatgaacggcaaagcactgccgaaagatccagtagcgtactggccgattatgtcttctattccgcaaacattgctgtatgaaggttacggtattcgcaaaggcatgtggacggtgagctggctgcgcgacatgctaggcgagagcttaattcaggatgccagggcgcaggatcttagtccggaagatttactcaacaaaaaagcttcttgtgtgccgccaggctgtaatggtctgatgacggtgctggactggctgaccaatccgtgggaaccgtacaaacgcgggattatgatcggctttgattccagcatggattacgcatggatatatcgtagcatactggaaagcgtggcgctgacgctgaagaacaattacgacaatatgtgtaatgaaatgaatcactttgcgaagcatgtgatcattactggcggcggtagcaacagcgatctgtttatgcagatttttgccgacgtgttcaaccttccggcacgacgtaacgccattaacggttgtgcaagcctgggggcagcgattaatacagcggtaggtctggggctatacccggattacgcaacggctgtcgataacatggttcgcgtgaaagatatctttataccgattgagagcaatgccaaacgctacgacgcgatgaataaaggcattttcaaagacctaaccaaacatactgatgtgatcctgaaaaaaagctatgaagtgatgcatggggaattggggaatgtggatagcatccagagctggagcaatgcgtaagtgaggaaggccgggcgggaaactgcccggcctgaacatacctgaatggttatccccgctgacgcggggaacataagttcgacaacttaaaaaatgataacaagtccggtttatccccgctgatgcagggaacataataaaaactttaactagttcggtttatccctgtttttacaaggaatattaactacactcgatgtctttagaataaaagacaatacgaatcgcactttatcaattttcacttaaagtatgaactggatatctttattcataagaactattcatcaacagcgtatagaggcggttatgtaaaaccactcattagcctcaaaacaaagacaaacttccagatttattacttaaccaatgaataacaagcttaaaaaatatactgttattctaaagaaaaaattaacaggcattaattcaatattaaaaaaataatagattaaaatttcttaacgatttaagaatcatacaaataacactttgattaaatttaattttttgtatcgataattgtgaacctctctggcatggagaactattttgaacatgaggtgttacgtggatatgttgcttattacaagtactgctaatataaaaacttgagaaagagataacgggttatatggtggtttatccccgctggcgcggggaactcgacagaacggcctcagtagtctcgtcaggctccggtttatccccgctggcgcggggaacacctgttttcgcaaatctatggactattgctattcggtttatccccgctggcgcggggaacacgggcgcacggaatacaaagccgtgtatctgctcggtttatccccgctggcgcggggaacactggctctgcaacagcagcacccatgaccacgtcggtttatccccgctggcgcggggaacacgaaatgctggtgagcgttaatgccgcaaacacaggtttatccccgctggcgcggggaacacattacgcctttttgcgattgcccggtttttgccggtttatccccgctggcgcggggaacactctaaacataacctattattaattaatgattttttaagccagtcacaatctaccaactttatagtatcacacaaacaacacatccattatgttaaagagcacttaatccattgattaaaaaggtaaatatttaaaataactctatacaaactaaaatctaccaaactttaccgcaataattttcactccagcgaaaaattaatgccacagaatttgtagagaatgctaatgattagccctggatgggtaaaatggaggagttttcagaggcgacaaacaatataaatgagtagaagtctttacaggttccacccatttataacgcttataaatgtttaatcaggcaatatttagatatttatgtgtttgcatgctcaaacgccaattacgcgcaatgcaggtttcaatgcacaaacgtgtggcatcatccttttggctaatcggctgcagtgcaatgactcgcggtttatcatcggtcagcgttgccagtagttcatccagtgcttcaatatcgcgtacgcgccccactggatgcttgatttcgttggctcgctccagtgcctgactcaacacttcatagccgccgcgcatgttcagctttgggcttacggtaacccaggtattcggtgtgcagcgtacctcatgagtaccactggtttcgatctggcagctaaaaccgttcttttcgagcagatcagtcagtggcagcaaatcatgaatgcaaggctcaccacccgtaatcaccacatgccgcgcggtgtatccctggcgaccaatgacagccagcaaatcttcactgctcgcagccccccacttatcactctctttggtcttcgccagaatgctgaaaagggagacttcccgatcctcaagcttttcccaggtgtgtttggtgtcgcaccaggcacagccaaccgggcatccctgtaaacgaataaaaatggcgggaacgccggtaaagtaaccctcaccttgcagggtctggaacatctcgttaatcgggtactgcatagcattctctgtgaagtggataattgttaattattgcagatcctgccacaacaatcatgtcttattaacattctgttacaggcaggtttaaagaaaaatgcgaaacatatcgttaataattaaagggagtaacgtattatgtcagaagaaaataaagaaaatggatttaatcatgtcaaaacattcaccaaaattatatttattttttctgtattagtttttaatgataacgaatataaaattaccgatgccgccgtcaatttatttatccagatttaatgagaaatttataatgcgctatttcatactaatgttcactttcgtatgttcctttgttgcagcccaaccaactattgtcccacaattacagcaacaagttacggatcttacgagtagcttaaacagtcaagaaaagaaagaactgacgcacaagttagaatctattttcaataatacccaagtgcaaattgccgtattaattgttcccacaaccaaagacgagacaattgaacaatatgctacaagagtttttgacaattggcgtttaggagatgccaaacgtaatgatgggatactgatcgttgttgcctggagcgatcgcactgtccgcatccaggtaggttatgggctggaagaaaaggtaaccgatgctctggctggagatatcatccgtagcaacatgatacccgcatttaaacaacaaaaattagctaagggattagagctagctataaacgctttgaataaccaactcactagtcaacaccaatatccgactaatcctagtgaaagtgaaagtgcgtcttccagtgatcattattactttgctattttttgggtatttgcagtgatgttcttccctttctggttttttcatcaaggcagtaatttttgtcgcgcatgtaaaagtggagtctgtattagtgcaatctatcttttagatttattcctgttctccgataaaattttttccattgctgtattttccttcttttttactttcaccatatttatggtctttacctgtttatgtgtacttcagaaaagagcatctggtagaagttatcatagtgacaacagcggttccgctggaggcagtgatagcggcggatttagcggcgggggcggttcttctggaggtggcggcgcatccggccgctggtaactcaaccataaaaaatgccagcccggaggctggcatttttaaatcagataaagtcagtcttatgcctggcctttgatctctttacgaccgttgtacggtgctttttcgcccagagcttcttcgatacgaatcagctggttgtatttagcaacacggtcagaacggctcatagaaccagttttgatctggcctgcagcagtaccaacagccaggtcagcgatggtagcgtcttcagtttcgccagaacggtgagagataactgcagtgtagccagcatctttcgccatcttgattgcagccagagtttcggtcagagaaccgatctggttgaatttgatcaggatggagttagcgatacctttttcgataccttctttcaggatcttggtgttggttacgaacaggtcgtcaccaaccagctggattttgtcgcccagaactttggtctggtatgcgaaaccgtcccagtcagattcgtccagaccgtcttcgatagaaacgatcgggtactgtttggtcagttcttccaggaagtgagtgaattcttcagaggtgaacgctttgttgccttcgccagccagaacgtatttaccatctttgtagaattcagaagctgcgcagtccatcgccaaagtgatgtctttgcccagttcataaccagcagctttaacagcttcagcgataacagccagagcttcagcgttggaacccaggttcggcgcatagccaccttcgtcaccaacagcagtgttcatgcctttcgctttcagaacttttgccaggtgatggaaaacttcagaacccatgcggatggcttctttcacagttttcgcgccaaccggctgaatcatgaattcctggatatcaacgttgttgtcagcgtgctcaccaccgttgatgatgttcatcatcggaaccggcatagagtatttgcccggagtaccgttcagttcagcgatgtgctcgtacagcggcatacctttagcagctgcagcagctttggcgttagccagagatacagccaggattgcgttcgcgccgaatttggatttgttttcggtgccgtccaggtcgatcatgatcttgtcaatgccagcctgatctttagcatctttgccaatcagcgcctgagcgatcgggccgtttaccgcagcaacagctttggttacgcctttacccaggaaacgggatttgtcgccatcgcgcagttccagagcttcacgggaaccagtagaagcaccactcggagcagctgccataccgacgaaaccaccctccagatgtacttcggcttcaacagtcgggttaccacgggagtcgatgatttcacgaccgatgatttttacgattttggacattaggttttcctcaagtcactagttaaactgaaactccagacaaacaacgcgtacccagggtacgcgttgccgctctaacttttttacttacttcgcctgacgtttctggaactcgctggcggctttcacaaagcctgcaaacagcgggtgaccatcacgtggagtagaagtaaactccggatggaactggcaagccacgaaccacgggtgattcggaacttcgatgatctcgaccaactgatcatccccggaacggcccgcaacgcgcagacctgcatcttcaatctgtttcaacagcatgttgttgacttcgtaacggtgacgatgacgctcaacaattgtcggcgcattgtacagctggcgaaccaggctatcgtcaaccaactggcactgctgtgcgccgagacgcatggtaccgccgagatcgctcttctcgctacgaacttcaacgttgccgttttcatcgcgccactcggtaatcagcgccacaaccgggtacttacagtctggcacaaattccgtagagttggcgttctccatgttggcaacatggcgagcgtaatcaattaacgccacctgcatacccaggcaaatgcccagataaggaatattgttctcacgcgcaaaacgcgcggtcgtaatcatgccttctacgccacgatagccgaaaccgccaggtacgaggattgcgtccagacctttaaggatttcaacgccgcgcgtttcaacatcttgactatcgatcagtttgatgttgacgctgacacgattcttcagcccaccgtgtttcagtgcttcgatcacacttttataagcatccggcagttcaatgtacttgccgaccataccgatggtgacttcacttaccgggttcgcttcttcgaagataacctgttcccattcggacagattcgcttccgggcagtttaagctgaatcgtttacaaatataatcgtccagcccctgagatttcaacaggcccggaattttatagatggaatcgacgtctttcagagaaataaccgctttttccggaacattacagaacaatgcaatcttcgcacgttcgttcgccggaacagcgcgatcactacgacaaatcaggatgtcaggctggataccgatggagagcagctcttttacagagtgctgagtcggtttggttttgacttcaccagacgctgccatgtacggcaccagcgtcaggtgcataaacagagtgtgctcacggccaatttcaacagccatctggcgaatcgcttcgaggaacggcaaggattcgatatcacctactgtaccgccgatttctaccagtactacgtcatgaccttcgccaccttccagcacgcgctctttgattgcgttagtgatgtgcggaataacctgcacggttgcgccgaggtagtcaccgcggcgttctttacgcagaacgtcagagtagatacgacccgtggtgaagttgttgcggcggctcattttggtacgaatgaaacgctcgtagtgccccaggtccaggtcggtttcagcgccgtcttcagtaacgaacacttccccgtgttggattgggctcatagtacctggatcgacgttgatgtacggatccagtttcatgatggtcacattgaggccacgggcttcaagaatggctgcgagggaggctgcggcaatgcctttacccagagaggatacgaccccgccggtcacaaaaatatagttcgttgtcatgctgaacctgagaagttaggttgaaaagacgatggaataaccaagacgggaaagcagtatacccgaacatgacctgtgccacaaactttcattatccctcctcttcgccagcgcactattgaaatcaggagtgagaaaatagcccctttggggtaaatgtttttgacgcaaatcaagcgcttgtcatttaaaaaatgacacaaatggcgcttgaccgcgtaattcccttagagatcaatttcctgccgttttacctgttgccagacttcttccattgtttcgaggtcaacacctgtcatttccagtccacgcgcggcaacaatacgctccacttcgcgaaaacgacgctcgaatttttcgttcgctttttgcaatgcgatttctgctttcgtccctaaatggcgagccagattaaccgtggcaaacagcaggtcccccatttcctcctccagtttagcctggtcgacaacagcctgccgcgcttcgtacatcacctcgtcgatctcttcgtagactttatcgactaccggaccaagcgtcgtccaatcgaagccaacgttggcgcaacgtttctggattttttgcgcacgcattaaagccggtaaactacgaggaatatcgtccagcgcgctatgctgcgctttctgcgcgcgctcttcggttttgatttgctcccaacgggcaagcacttcactactgttttcggcagaactatcagcaaaaacatgcggatggcgacgctctaatttatcgctaatagcagcgcaaatatcattaaagtcaaagcgcccttcttcctgagccatttgcgcgtaaaacaccacctggaatagcagatcgcccagttcaccgcgaagatcgtcaaaatcttcacgggcgatggcgtccagcacttcgtaggtttcttcaagggtgtaaggcgcaatggtggcaaatgtctgctctttatcccacgggcagccgttttccggatcgcgcaggcgctgcataatagtgagcaaacggtcgatttgattcattgaattgtcctgaaaattgcgggtctgtcaggtggaaacctgtgaccagaatagaagtgagttagtaacattacccaatcagtacgttaattttggctttaatgagttgtaattcctctggggcaactgttcctttcttcgttgctcctcttgcccgccaggcgatactttttacctgatcagctaacgctacgccatcacgttcctgaccggataaaacaacttcgaacggatatcctttactttgcgttgtacaaggaacacacagacacatacctgttttgttgttgtacatgaaaggactcaggacaacagctggacgatgtccagcttgctcgctaccttttgtcgggtcaaaatcaacccaaatcagatcgcccatatcgggtacgtatcggcttaccattaccagacttccttatctttcggctctccccagtcgatattctcgtggaggttttccggcgtgatgtcgttgaccagttcagcaagcgtaaatacgggctctttacgcactggctcaataattaatttgccatccaccaggtcaatcttcacttcatcatcaatattcagattgagcgcctgcattaacgtagccgggatccgcaccgccggactatttccccaacgctttacgctactgtggatcataaccctttcctcaaaccgctatcatatgtagatacagtatatatcaatctacattgtagatacgagcaaatttcggcttaactcccgtgcaaccgacgcgcgtcgataacatccggcacctggttgagtttacccagcacgcgccccagcacttgcaggttgtaaatctcaatggtcatgtcgatggtcgccagttgctgtttggtgtcgctacggctggcaacgccaagcacgttcaccttctcgttggcgagaatggtcgtgatatcacgtaacaacccactacgatcattagctaccacgcggaccaccaggctatatccggcggagtagctctcaccccataccgcgtcaacaatgcgttctggcgcatgggagcgcagttccgccagttgttcgcaatcggcgcggtgtacactaataccgcgcccctgggtaatgaagccgacaatctcatctccaggaatcggctggcagcagcgcgcgatgtggtgcatcaggttgccaacaccttcgactaccacgcgaccgttatctttactgcggttttgcggcgtgtagcttttttgctgaagttgcttcagcgcggcggcgtcctgctcttcggcactcggcttattaaattggctttgcaggaagttcaccatctgattgagacggatatccccgccaccaatcgccgccagcaactcgtcgacatcattgaagttgtaacgcggcagcagatgtttttctgcttctttcaggctgatccccagatgttccagctcgtcgtcaaggatttgccgcccagccagaatgtttttgtcacggtcctgtttacggaaccaggcgtgaattttgctacgcccacggctggttgtgacgtaaccgaggtttgggtttaaccagtcacggctggggttcggctgtttctgggtgataatttcaatctggtcgcccatctgcagctggtaggtgaacggcacaatgcgcccgccaatttttgccccgatgcagcggtgtccgacatcactgtggatgtggtaagcgaagtccagcggcgtacttcccgcaggcaaatcaacgacatcacctttcggcgtaaagacgtacacccggtcgtcaaagacctgactacgtacttcgtcgagcatttcgccggaatcagccatctcttcctgccacgcaatcagtttacgcagccaggcaatccggtcttcatgtccgctacgtgcgccgccagcagccgcgccctctttatatttccagtgcgcagcaacacccaactctgcatcttcatgcatctgtttggtgcggatttggatctcaacggtttttccacccggccccagaaccacggtatgaatagactgataaccgtttggtttcgggttagcgacgtaatcgtcaaactcatccggcaggtggcgatagtgagtgtgcactatccccagtgcggcatagcaatcctgtaaacgctcggcgacaatacgtaccgcacgcacatcaaacagctcatcaaaggcgaggttctttttctgcattttacgccagatgctgtagatgtgtttcggacgaccatacacttccgctttaacgccttcagctttcatctcagcgcgcagatgaccaacgaactcttcgatgtagtgttcgcggtcgagacgccgttcatgcagcagtttggcaattcgtttgtattcggttggatggaggtaacggaagcagtaatcttccagttcccatttcagttgtccgattccgagacggttagccagcggtgcgtagatgttggtacactcttttgccgccagtacacgttcatcttccggcgcatcttttacttcgcgcagatgagcaatacgctccgccagtttgatgactacgcagcgaaaatcatcgaccatcgccaataacatccggcgaacgttatcgacctgttcggaggaaacagaatcagtgtgcgtcgctttcagctggcggatcgccgccatatcacgcacgccgtgaataaggttaacgacgctcttaccgacgctctcacgcagcacatcttcgctgactacgttggcatccgccagagggaaaagcagcgccgcccgcagcgtgtcaatgtccatacttaatgtgctgaggatctccaccatctcaacaccacgccacaataacagactggcatccggatgcccctgcgtctgttgcagacaatacgcccaggtttcggctaagcactcacagctcttctggctggtaatacccagacttgcgatccatttttccggatcaaattcaccagccttattgatatgtgcacttcttaccgcaaccatcgtcctctcctttagggaccagacctgccgaaatcggcaaatcgcaattatttaacgcggctgaaaagtaccatgctttccagatgtcccgtgtgtgggaacatatccagcatcgccagtcgcgcaatggtatatcctgcttttaataacgcttcgctatcccgagccagcgttgcagggttacaggatacataaactatacgaataggttccagttttataatttgctgcataacacctgcggcacctgctcgcgccgggtccagcaacactttatcgaagccgtttttcgcccacggctgctttgtgacatcttcttcaagattttcgtgataaaacgtcacattctgtaagccattaagacgcgcattctgctggcctttttccaccagcgccggaacaccttctacaccgaccacactggcagcttgtgtcgccaatggcagtgtaaagttgcccataccgcagaacagatccagtacgcgatcttcaggttgcacatccagccattccaacgcacgcgctaccattttttggttcacacccgcattgacctgaataaaatcgcgcgggctaaaagttaagcgcaacccgttactgtcataccagggcatctcaccagagacggtttcgagtatctcactatcgggggcgagatacagatccaggccttcagaatggctaaagcgttccagtttttcgcgatctgcgctacttagcggtgcggtatggcgcaaaatcatcagcgtgccgctggttgcctgtaccagttcaacatgaccaagatggcgcatagcttgtaagctgcccagacatgccctgactttgggcagcaatgcttcaagttggggcgctaaaatggggcattgtttgacgtcgacaatgtcactggagcccgctttgcgaaaccccatctgaagttgctgtgttttcggtaagtagttcagacttaaacgcgcgcgacggcgatagccccagggaacatcggcgatcacttcagagacatcgtgtttcattaatcgggcgagtgccgcacttttgcttcgctgctgtaaatccacgctggcgtgttgttgctgacagccaccgcatacgccaaaatgaggacagcgtggcgtttcgcgttccgggctatcgcttaaccggcgtacgactttagcgcgggcatactgttttttatcttcagtaacagtaacttccgcgttttcctgcggcaataatccggggataaatagcgttttgccgttatgtcgcgccacgccctgaccaaaagagtcgaggtcgttgacactaacggttatgatctgacgcgtcgtcgtgcgtcgttttgcagagtagaattgcgccattggcgagactttctcaatttaacagtgtgaccttaattgtcccataacggaactccatgaccaactacagcctgcgcgcacgcatgatgattctgatcctggcaccgaccgtccttattggtttattgctgagtatctttttcgtcgtgcatcgctataacgacttgcagcgtcaactggaagatgccggtgccagcattattgagccgcttgcagtttctactgaatatggcatgagcctgcaaaatcgcgaatctatcggtcagttaataagcgtactgcatcgtcgccattccgatattgttcgcgcgattagcgtttatgatgaaaataaccgactctttgtcacctccaattttcatcttgatcccagtagtatgcagctcggcagcaacgtgccgtttcctcgccagctcactgtcactcgtgacggcgatattatgatcctccgcacgccgattatttctgagagttactcccccgacgaaagccccagtagcgatgccaaaaatagtcaaaatatgttgggatatattgcgctggagctggatcttaaaagcgttcgcttgcagcaatataaagagatctttatttccagcgtgatgatgctgttttgtatcggtattgcgcttatttttggctggcgcttaatgcgcgatgtaaccggtccgattcgcaacatggtgaataccgtcgaccgcatccgtcgcgggcaactcgacagccgggtggaaggatttatgctcggcgagctggatatgctgaaaaacggtatcaacagcatggcaatgagcctggctgcttatcacgaagagatgcagcacaatatcgaccaggcgacgtccgatctgcgtgaaacgctggagcagatggaaattcagaacgttgagttagatctggcgaaaaagcgcgcccaggaagcggcgcgtattaaatccgagtttctggcaaatatgagtcacgagctgcgtacaccactgaatggtgttattggctttacccgcctgacgctgaaaacagaattaacaccaacgcagcgcgatcacctgaatacgattgaacgtagcgcaaataatttgctggcaattattaatgatgttctcgacttcagcaaactggaagcaggtaagctgattctggaaagtattccattcccactacgcagcacgctggatgaagtcgttactctgctggcacattcttctcacgataaagggttagaactgacgctcaatattaaaagcgacgtgcctgataacgtgatcggcgacccgctgcgattacagcaaatcatcactaacctggtggggaatgcaattaaattcaccgagaatggcaacattgatattctggtagaaaaacgtgcgctgagtaataccaaagtgcagattgaagtgcagattcgggataccggcattggtattcctgaacgcgatcaaagccgcttattccaggccttccgacaggctgatgccagtatttcccgccgtcatggtggcaccgggctggggctggtgattacacaaaaactggttaatgaaatgggcggcgatattagcttccatagccagccgaatcgcggtagtactttctggttccacattaatctcgatctgaacccgaacattattatcgaagggccatccacccagtgcctcgcaggtaagcgcctggcctatgtcgaaccaaactccgcagcagcgcaatgcacgctggatattttaagtgaaacgccgctggaagtggtttatagcccaacgttctccgcgctgcctcccgcgcattacgacatgatgttgttaggcatcgcggtgaccttccgcgagccgctaacaatgcaacatgagcgattagcgaaagcggtaagcatgaccgatttcctgatgctggcacttccttgccatgcacaagtcaatgctgaaaaactcaagcaagatggtatcggcgcgtgtctgctgaaaccattaacacctacacgcctgttgcctgccctgacggaattttgtcatcacaaacaaaacacgcttttgcctgtaaccgatgaaagtaagctggcaatgacagtcatggcggttgatgacaaccccgctaacctgaaacttatcggcgcattgctggaagatatggtgcaacatgtggaactttgcgatagcgggcatcaggcggttgaacgggcgaaacagatgccgttcgatttgatcttaatggatattcaaatgccggacatggatggcattcgggcctgcgaactcatccaccaactcccgcatcagcaacaaacgccggttatcgcggtaacggcgcatgcaatggccgggcaaaaagagaagctgcttggcgcagggatgagcgattatctggcgaaaccgattgaagaagagcgattgcataatttgttgttgcgctacaagcctggcagcggtatttcctctcgcgtcgtgacgcccgaagtcaacgaaattgtggtgaacccgaatgcgaccctcgactggcaactggcactacgccaggcagcaggaaaaaccgatttagcgcgcgatatgctgcaaatgttactcgatttcctgcctgaagttcgcaacaaagttgaggaacagctggttggagaaaacccggaaggcctggttgatttgattcataaactgcatggcagttgcggctatagcggtgtgccacgtatgaagaatctctgccaactgatcgaacaacagctacgtagcggtactaaagaagaagatttggaaccggagctgctggaactgttggacgagatggataatgtcgcgcgcgaagccagcaaaattctcgggtaatggatgtcttgtcgagtagcaatcggctttttatgacgctggtttcagattggtgacaaagtgcctgtgtttatgccggatgcggcgttaacgccttatccggcctacaaaaccaattaaattcaatgaattaaaaaatgatgtagacctgatacatagcacaacaggctattttgcgtttagcatcagtctcaaaccggctccagatagagccggttttggttttctgtcttaacgcaccatgcacgggcgcttgttatcgaacgtccagccaggaatcagatactgcattcccatcgcatcgtcacgcgcgccaagcccgtgtttctgatacagctcatgggctttcatcacttgatccatatcgatttctacacccagccccggtttttctggcacctgtaccagcccgcctttgatctcaaacggttctttggtcaggcgctgattgccttcctgccaaatccagtgcgtatcaatagcagtaattttacccggtgcagcggcggcaacatgggtaaacatcgccagggaaatatcgaagtggttgttagagtgactaccccaggtcaggccaaattcatggcacatttgcgccacacgtacgctaccttgcattgtccagaaatgcggatccgccagcgggatatcaacggattgcagggagagcgtatggcccatttgccgccagtcggtggcgatcatattggttgcagtcggtagacctgtcgcgcgacggaactctgccatcacttcacgcccggagaaaccttgctccgcaccacacggatcttctgcataagccaggctacctttcaggtatttaccgattttaatcgcttcgttcaggctccaggcaccgttaggatcgagcgtaatacgcgcctgcgggaagcgttgcgccagtgccacaatagactcggcctcttcttccccggccagtacaccgcccttcagtttgaaatcgttgaagccatatttttcatatgccgcttccgccaggcgcaccaccgcatccggcgtcatcgcttcttcatgacgcaggcgataccagtcgcaactgtcatccggctggctttgatacggcagcggcgtggctttgcgattaccgacgaagaacagataaccgagcatttcgacttcgctacgctgttgaccatcgcccagcaggcttgccacgtttacccccagatgctgccccagcagatccagcattgccgcttctatcccggtaactacatgaatagtggtacgtaggtcaaatgtctgcaaaccgcgcccaccagcatcacgatcggcaaaagtattacgcaccagcgtcagaacgtttttgtattcacccagcgttttacctaccaccagcggaatcgcatcttccagcgttttacggattttctcgccgccgggaatttcccctacgccagtgtgaccagaattatctttgataatcacaatattacgcgtaaagaacggtgcgtgtgcaccactcagattcatcagcatactgtcatgacccgccaccgggataacctgcatttcagtaacaacaggcgtcgtaaattgagaactcatatttatgtcctttttcagaatcaatgacggccgaaaacgggacgtttacggtcaaaggtccagccggggatcaggcactgcatcggacctgcgtcgttacgcgcaccgccaggcagacgtttataggcctcatgtgccttttgtacctgttcccagtccagttccacgcccagaccgggcgcatcaggaacggcaatttttccgtttttaatctccagcggattttgggtcaggcgacaatcgccctcctgccaaatccagtgggtatcgatagcggtaggattacccggtgccgccgcgcccacatgggtaaacatcgccagagagatatcgaaatggttattagaatggcagccccaggtcagcccccagtcgtcgcaaagctgcgccacacggactgcaccggaaagcgtccagaagtgcggatcggcaagtggaatatctaccgcattgagcatcaccgcatgacccatttcgcgccagttggtggcgatcatgttagtcgcgacgggcaagccggtcgcccgtcgaaattccgccatcacttcacgtccggagaagccctgttctgcgccgcatggatcttcggcataggtaagaacatcattcagccctttgcataaagaaatggcttcatcaagcagccatgcaccgttgggatcaacggtaatccgcgcatccgggaagcgtttcttcaatgcacgaacagtgtcgatttcttgctcgccaggtaacacgccgcccttaagtttgaaatctttaaagccgtagcgatcctgactggcttccgccagacgcacaacggcttcgctgttcattgctttctgatgccgcaactgataccactcatggttgcccggcgtattttccacataaggaagatcggttttggtccgatcaccgatataaaacagataaccgaggacggtaatagcctcgcgttgcttgcctggccctaacagttcgcagaccggaacattcagcgccttacctagcaggtcaagcaaagcggcttccagcgccgccacggcgttaacgcgtaattcaaaggtccaggcacctttaccgaaggtatcaaaatcggcggcctgattacctttatgcacctgctggaccactttattcagtcgcgcaacttcctggcccagaaccatcggaatagcatcgacaagcgtctgataaatcacatctccgcccggcgcttcaccaatgccggtatgcccggcgttatcggtgagtaccacaatattgcgggtgaaatatgcgttatgtgccccaccaatattaagcaacatgctgtcatgcccggccaccggaatgactttcatatcagtaataacaggactggattgtgtcgccatcttattgccccgcaacaggtttcaactcgatacgcttgatatcgcccaccagcaccaggtagctcagtaccgcgattaaggcatgaacaccaacataaatcagcgccccattaaagctgccagtcgtgccaacgatataaccaattgcgattggcgtgacgatgccagaaatgttaccgaacatgttgaacaggccaccggaaagaccgctgatctcttttggcgcggtatctgccattactgcccaacccagcgccccgatgcccttaccgaagaaggccagcgccataaagccgatgatcatccactcaacgttgacgtagttgcagaacaccatcaccatgctcagcaacatgcccattacgatcggtgttttacgcgcaatgttcaggcttcccgtgcggcgcatcagccagtcggaaataatcccacccagcacaccgccgataaaaccgcaaaccgccggaacggaagccacaaagcccgctttcagaatgctcatcccgcgtgcctgcaccagataaaccgggaaccaggtaataaagaagtaagtcagggcgttgatacagtactgaccgatataaacgccgatcatcatccgactccctagcagctgtttgatctgcccccacttcacgctgaacggcactttaactttggtgttttgctgatccatattgatcagcgcaccacccgcggcgatgtactccagctctttcttatttacccccggatgttgatttggctcgtggatgactttcaaccagataaagctgatgacaatccccagaccgcccataaagaagaagacgtgactccagcccacttcatgcgtcagccagcccataatcggcgcgaagatcaccgttgcgaagtattgagcggagttaaaaatgctcaccgccgttcccctttcctgcgccggaaaccaggccgcaacaatgcgactgttgccggggaaagatggcgcttcagcaagcccgaccaggaagcgcagcgtaaacagggcaacgataatgccgaatccactaaagatatcgacgaagccttgcagcaaggtaaacatgctccagataaagatgctccagaagtagacgcgtttactaccaaaacggtccagcaaccagccaccagggatctgcccgataacataagcccaactgaaagcagagaacacatagcccattcccacgggatcaaggccgatatctttggccatttcgctaccggcgatagagagcgtagcgcggtcgccgtagttgaaggatgtgacgataaacaacatcaccactatccagtaacgagcatttgtgcgtttttccacactgctcgcagcctgacttaaagaactcattgttgcactcctgaaaattcgcgttagccacgctcactctggactgcgacatcgccaggaaatcagaggtgacgtagggtgttttttgccgtttttataggtcgttcgccgaatacggcgcgtgtttatatctggcaatagcagtataaaaagcgcgccatagcggctcaccgtgcaacaacacaacattaatgcgttcaatgaggcccgattttggcattagccctggacggtggaatccacttcacggaaatgaaaacaagaacaagaaaggaagggttaaaacgaagaaataaagaagagtatgaaatggatcgcttgactccaggcaaacgccagtaaaaatccgcgctatgaagcagtttttactggcatttgcctgaaaagattcgattcagcaccgctaaaacgacatttaccgctcgctgaacatatcaggacaacagcgtgccccactgttcgacccacggattactttccgtttccggttccgggttctcactggcgtcaatcaacagcatttcgccaacccgctgagcgctctgttcctgcaacaaggcatcgaactgtttgccgccattgcagaaattcacataactactgtcgccgagcgcaatcacgccataacgcagattcggctggaagcccagactatctttgattccctgaaagagtggcacaatgctatcaggaaggtcgccctgcccggtcgtggacgtaaccaccagaacatacttatcctgatagggcagccagtcgcttaattcaggatcttcaaataccgttgctttgtggccctgcgcggtcagaatcgcttccgcttcttcggccactaacagactattcccgtacatggtgccgacaaaaataccaatttccgccataccgttttctccctggattaggaacttatctctccatcctgaccgcttggcgcactgaactcaaccctttcattttcaggaagcagaccgcgccagccaaattgacttaacgcctgcatccaggtgtcgtccaggcccgcgtgaatagtcagcggctcgccagtaaaaggatgcgtcaaactcaactgactggcatgtagcattaaccgctggaggccaaaatgctcagcaccgctgcgattctggcgtaaatcgccatgtttgctatcgccaataatcggatgacgcaaatgggcaagatgtcggcgaagctgatgtttgcgtccggttttcggctccagttccaccaggccgtagcgcgtggtcgggtaacgtccggtcgctaccggcatttctacggtcgccagaccgcgataatgcgtcactgctggctgcgggcctttatcttcgcgggcaaatttatcagcgattttgtccagttcttccaccagtggataatccagcaccgcttcttccatcaaccagccgcgcacaatcgcatggtaacgtttctggatttggtgctgttcaaactgttgtgccagcagccgtccggcctcgctggataatcccatcaacaacacaccagaagtgggtcggtccagacgatgagcagtaaaaacatgctggcctatctggtcacgcacggtttgcatgaccactactttctcgtcgcgatccagccagctgcggtgaaccagccagccggagggtttatttaccgcaaccagccattcatcctgatagagtatttccagcattagctcgcatcatccgcaaaaagagcatccagtttttccagctcagccagaataagcgcgcgttgcggatggtccgtcgccagcgccatttcataatagggtgcaacggcaaaagcgcccggtaacggctgtttgttatctaacaaatcgtgcattcgcgggatcagcacccactgcaaccactccagtggttccatggtgtccataaagaacggttgggtactattaaattgatgcggctggggttcatcgtttcgccagtgctgatgttcacgcagtaacgcttcaagcgcctgcaactggagacgaacgcggtcatgagtggtcataaagcaacctcaataagaaaaactgccgcgaaggatagcaggaataaaaaaagggagcactgtattcacagcgctcccggttcgtttcgcagcattccagctacttttgttgctccctgctcatccttgacaacttttcctctggccttgcggccaatcgttcatcctgaactattgcttcctgctcacaccaccccgatgtgatacttcatcctgaagtgtccctggccttcctgacccaccgaatcatcctgaccggttctcattctccatcctggaggtgtcctttaacgcgtcctgcgtcatcctcttcgcttcatccagaagcctttccctgaaacaccatcctggtgtgtcctgcagaagtgtcatcatcctgatgttcacttcgttgtctgactccctgtcgacgaagatagaatcgtctttttcgcgaagtcttacaaggcgcttacagacaatgccttaaggaaaatttcatatgaaagttaagaattaacaatcaacattttgattttaaatgaaaataacgattcttatctttttaagtattcgcttatttcctggcgatctcctacagagtctgtaagagatctctcacaaccagatggggtatttggattacagaagaggcttaagttgattaaggaattccgcaagattactggctaaatgcgtccgtttacgtgttcccagcgtctctttgcacacttcaccggagagattacacacgctgatgacctctaactcttcttccagcgtcgcgataaatagtgtgggcggcagttttagccttttctgagtcaccagatgaccaatcagattttcctgcacccgacggaagtcgtcttcactccaggtttgcagcaatgtcagtttgatatcgccaaactgcgcgtgcatatccccggcaaactgagtcgtataaaaggtatgaattgtgggttgtatcacaatatcaaaagcgcgttcaaccgcgtttacattttgttccccggtaaacggctggggttgccagtatacggcatcttcggtagtactaataatgcacggactaggaacaccgtacagttcctcacttaacggccagcttttatgctcttcatgccacgcatcgcagtagcgtgcagtaaaatctttcagggcttgtgcggtcaaatcgtccactaatttctctcttcacttaaaccagatacacttgtcgtttagtttatctggtttatgacggtgaaacatgtcttcttatgcaaaccatcaggcacttgcgggcctgactcttggaaaaagtaccgattaccgggatacctatgacgccagcctactgcaaggcgttccacgcagcctgaatcgcgacccgctgggtctgaaagcggataacctgccttttcacggtacggatatctggacgctgtatgaactttcctggctgaatgcgaaaggtttgccgcaggtcgctgtcggtcatgttgaacttgattacaccagcgtaaatctgattgagagcaagagttttaagctctatctcaacagttttaaccagacgcgttttaataactgggatgaggtgcgccagacgctggagcgcgacttaagcacttgcgctcagggtaagattagcgtggcgttatatcgtcttgatgaactggaaggccagccgataggtcattttaatggcacttgcattgatgaccaggatatcactatcgataactatgaattcactactgactatctggagaatgccacctgtggtgaaaaagtagtggaagagacgcttgtcagccacctgctgaaaagtaactgcctgatcacccatcaaccagattggggtagcctccaaattcagtatcgtggacgccaaattgacagagaaaaactgctgcgttacctggtcagtttccgtcatcacaacgagttccacgaacagtgcgtggaacgcatctttaatgacctgttacgcttctgccagccagaaaaattgagcgtttacgcacgttatacccgtcgtggcggtctggacattaacccgtggcgcagtaatagcgattttgtcccaagcaccacaagactggttcggcaataaatttttctcaattttgcgtgctggattcacgcagaaggttgtgaaaggtcatcaggcagggctattgtaatcaaagggaatgacgatattcgtcccataaggagtttttcttgattacacatattagcccgcttggctccatggatatgttgagccagctggaagtggatatgcttaaacgcaccgccagcagcgacctctatcaactgtttcgcaactgtagtcttgccgtactgaactccggtagtttgaccgataacagcaaagaattgctgtctcgttttgaaaatttcgatattaacgtcttgcgccgtgaacgcggcgtaaagctggaactgattaatcccccggaagaggcttttgtcgatgggcgaattattcgcgctttgcaggccaacttgttcgcggtcctgcgtgacattctcttcgtttacgggcaaatccataacaccgttcgttttcccaacctgaatctcgacaactccgtccacatcactaacctggtcttttccatcttgcgtaacgctcgcgcgctgcatgtgggtgaagcgccaaatatggtggtctgctggggcggtcacagtattaacgaaaacgagtatttgtatgcccgtcgcgtcggaaaccagctgggcctgcgtgagctgaatatctgcaccggctgtggtccgggagcgatggaagcgccgatgaaaggtgctgcggtcggacacgcgcagcagcgttacaaagacagtcgttttattggtatgacagagccgagcattatcgccgctgaaccgcctaacccgctggtcaacgaattgatcatcatgccagatatcgaaaaacgtctggaagcgtttgtccgtatcgctcacggtatcattatcttccctggcggtgtgggtacggcagaagagttgctctatttgctgggaattttaatgaacccggccaacaaagatcaggttttaccattgatcctcaccggcccgaaagagagcgccgactacttccgcgtactggacgagtttgtcgtgcatacgctgggtgaaaacgcgcgccgccattaccgcatcatcattgatgacgccgctgaagtcgctcgtcagatgaaaaaaagcatgccgctggtgaaagaaaatcgccgtgatacaggcgatgcctacagctttaactggagtatgcgcattgcgccagatttgcaaatgccgtttgagccgtctcacgagaatatggctaatctgaagctttacccggatcaacctgttgaagtgctggctgccgacctgcgccgtgcgttctccggtattgtggcgggtaacgtaaaagaagtcggtattcgcgccattgaagagtttggtccttacaaaatcaacggcgataaagagattatgcgtcgtatggacgacctgctacagggttttgttgcccagcatcgtatgaagttgccaggcagtgcctacatcccttgctacgaaatctgcacgtaatctccgctcccccggtgacgtttgttgccgggttttctcgtttttggtcacttactcatcaactcatttcatttgttatatgaatgtttctcaccaccctcacgcgacaaatatcatcacagttaatatgtcatacaatttatgttgcaacgcaaacgtttccctattttcataaaccgtattttatcgctatgaaaaagaaattatcgccatgattaactaaaagtattgattttttcagttcaacctacatatattgcgcgccccggaagaagtcagatgtcgtttaatgggcaaatattgcccttaaattctcttttacttttgatttacagagtaaagcgttgggataatctatcttccaagtagattattgtatttgagatcaagatcactgatagatacataacttgtgtgtatctttccgccctcaaattattacggcggtaaatgattaagccatcgccgatagacagatttcatttttacggtcaggcaccttcccgggctgaactggctaaaagctgaattatttgcattcctccaggagaaatagatggaaacgactcaaaccagcacgattgcgagcaaagactctcgtagtgcctggcgcaagacagacaccatgtggatgctgggcctttacggcacggcaatcggcgcgggcgtgctgttcctgccaatcaacgccggtgttggcggtatgatcccgctgatcatcatggctatccttgcgttcccgatgacgttttttgctcaccgcggcctgactcgcttcgtactgtctggtaaaaacccgggcgaagacatcaccgaggttgtagaagaacactttggtattggcgcaggtaaactgattaccctgctctacttcttcgctatctacccgatcctgctggtttatagcgtggcaatcaccaataccgttgaaagcttcatgtctcaccagctgggtatgacgccaccgccgcgtgcgattctgagcctgatcctgatcgtgggtatgatgaccatcgttcgcttcggtgagcagatgatcgttaaagcgatgagtattctggtattcccgtttgttggcgtactgatgctgctggctctgtacctgatcccgcagtggaacggcgctgcactggaaacgctgtctctggacactgcatctgcaaccggaaacggtctgtggatgaccctgtggctggcaattccggtaatggtgttcagcttcaaccactctccgatcatctcttctttcgccgttgcgaagcgtgaagagtacggcgatatggcagaacagaaatgcagcaagatcctggcattcgcacacatcatgatggtgctgaccgtaatgttcttcgtcttcagctgtgtactgagcctgactccggcagacctggctgcggctaaagagcagaacatcagcattctgtcttacctggctaaccactttaacgcaccggttatcgcgtggatggctccgattatcgcgattatcgctatcaccaaatccttcctcggtcactacctgggcgcacgtgaaggcttcaacggtatggtgattaaatctctgcgtggtaaaggtaagtctatcgaaatcaacaagctgaaccgtatcactgcgctgttcatgctggtaacgacctggattgttgccaccctgaacccgagcatcctgggtatgattgaaaccctgggcggtccaatcatcgcgatgatcctgttcctgatgccgatgtacgcaattcagaaagtaccggcaatgcgtaagtacagcggtcacatcagcaacgtattcgttgtcgtgatgggtctgattgcaatctccgcaatcttctactctctgttcagctaagtcctttcgcgccgctttcgggcggcgcttcctccgttttaacgcgatgtatttcctatgattagcgtattcgatattttcaaaatcggcattggcccttccagttctcataccgttggaccaatgaaagcgggtaaacaatttaccgacgatctgattgcccgtaacctgcttaaagacgtgacccgcgtggtggttgacgtgtacggcagcctctctctgaccggtaaaggccaccacactgatatcgccattattatgggcctggcgggtaacctgccggataccgtggatatcgattccatccccagttttattcaggatgtgaatactcatggtcgcctgatgctggcaaacggtcagcatgaagtggagttcccggttgatcagtgcatgaacttccacgccgacaacctttctctgcatgaaaacggtatgcgcattaccgcgctggcgggcgataaagtcgtttacagccagacttactactctattggcggtggctttatcgttgatgaagagcattttggccagcaggatagcgcaccggttgaagttccttatccgtacagtagtgcagccgatctgcaaaaacattgtcaggaaaccgggctgagtctctctggcctgatgatgaaaaacgagctggcgctgcacagcaaagaagagctggaacagcacctggcgaacgtctgggaagtcatgcgcggcggtattgagcgcggtatttccaccgaaggcgtgttgcctggcaaactgcgcgttccacgccgtgctgcggcactacgccggatgctggtcagccaggataaaaccaccactgacccgatggcggttgttgactggatcaacatgtttgcactggcagtgaacgaagagaacgctgctggcggtcgcgtggtgactgcgccgactaacggtgcgtgcgggattatcccggcagttctggcgtactacgacaagtttatccgcgaagtgaacgctaacagtctggctcgttacctgctggtagccagcgccattggttctctttataagatgaacgcgagcatttctggtgctgaagtgggttgccagggtgaagttggcgtggcgtgcagtatggcggcggctggtctggcagaactattaggcgcaagcccggcgcaggtgtgcatcgcggcggaaatcgccatggagcacaacctcggtctgacgtgtgacccggtcgccggacaggtacaggtgccatgcatcgagcgtaacgccattgcggcagtaaaagcggtgaacgccgcacgtatggcgctgcgccgtaccagcgagccgcgcgtctgcctcgataaagttatcgaaaccatgtacgaaacaggtaaagatatgaacgccaagtaccgcgaaacctctcgcggcggcctggcaatgaagatcgttgcctgcgattaatcgctctccaaaggcctcgttttgcgaggcctcttcccgatttctcatccagccgtagcctgttccggcatcgaatgttacccttatcgcctgatctttaagggggttatcgtggctgttcatttgcttattgtcgatgcactgaatcttattcgtcgcattcatgccgttcaggggagcccctgtgtcgaaacctgccagcatgcgctcgatcagctcattatgcacagccagccaacccacgcggtcgccgtttttgatgatgaaaaccgcagtagcggctggcgtcatcagcgtttaccagattacaaagcgggtcgaccgccaatgccggaagagttgcacgacgagatgcctgcattacgcgccgcctttgagcaacgcggcgtcccgtgctggagtaccagcggcaacgaagccgatgacttagccgccacgctggcggtcaaagtgacacaggccgggcatcaggcaacgattgttagcacagataaaggctactgtcagttacttagtccgacattacgtattcgtgattacttccagaaacgttggctggatgcgccatttatcgataaagaatttggcgttcaaccgcagcagttgcccgattactggggacttgcggggatcagcagtagtaaggtaccgggtgttgcgggaatcggaccaaaaagcgccacgcagctgctggtcgagtttcagagtctggaagggatatatgagaatctggatgcggttgccgaaaagtggcgcaaaaaattagaaacccataaagagatggcgtttctgtgccgcgatattgcccgcttacaaaccgatttgcatatcgacggcaatttacagcaattgcggttggtacggtaacggcgagccggatacgccgcaaacgtcgtatccggcattatcacatcagcgcatttaccaggcggtatggtaaagctctacaatatcctcaagcgttgcttcacgcgggttgccaccggtacaaacatcatccagtgccgcctgcgccagtgccggaatgtcttccttgcgtacaccaacatcacgcaaatgtggcggaataccgacatcacggttgagagcaaacaccgcttcaacagcggcattacgcgcctcttccaggctcataccttccactttcacgcccataacgcgcgcgatatcgcggtacttctcaccggtaaagtcagcgttataacgcatgacatgcggtaacaggatggcgttcgcaacaccgtgtggagtgttataaaacgcgcccagtggatgcgccataccatgcaccaaccctaacccaacattgctgaagcccatacccgcaacatactgcccgagcgccatttcttctccggcatccttatcaccagcaacgcttcctcgcagcgccccagcaatgatttcaatcgctttaatgtgcagtgcatcggttagcgcccacgcgccacgggtaatatacccctcaatagcatgagtgagcgcatcgacacccgtcgcagctttcagcgctggaggcataccatccatcatgtcagcgtcaataaacgccacctgcgggatatcatgcggatcaacgcaaacaaacttgcgccgtttctcttcgtcagtgatcacgtagttaatggtcacttctgccgcagtacctgctgtggtaggaattgccagaatcggtacactgggtttattggtcggggaaagcccttccaggctacgcacatcggcaaactccgggttgttgctgataatgccaatcgctttacaagtatcctgtggagaaccaccaccaatagcgatcaggtaatccgcgccgctattctggaatacaccgagcccttctttgacgacagtaattgttgggttgggcactacgccgtcgtaaatcgcccatgccagccctgcagcatccatcttatcggtcactttcgccaccacgccgcattgcaccagcgttttatcggtgacgatcagcgccttctgataaccacggcgtttcacctcatcggttaaagccccaacagcaccccgaccaaaccatgccgtttcgttcagaatcattctgttagccatcatccttctccttgttgctttacgaaattactcttcaattcgtaacccataggttttgaatttctccagcactacggcaatctcttcatcgctcagcactggcaccgggtccgtaatcgccagggtcgtcaggtaaagttgcgccagcacttcaacttcatgcgccagccataacgctttttccagattcacctcacaagcgataagcccatgatgttgtaacaaagttgccttacgatttttgagagccagcgcaacatgttcagaaagttcgcgtgttccaaaggtcgcataaggcgcgcaaggaatagaattaccgccagccgccgcaatcatgtagtgaatagcggggatgcttcggttaagaatggaaactgccgtgcaatgaacggcatgattgtgaacaaccgcgttggcatccggtctgctttgataggctgccatatggaaacgccattcgctactggggagctttccttcctcatgtttaccgttgccatcaataaagacaatatggctctccgtcagtttttcatatggaatgcctgtaggcgtaatcagcatcccatcctgataacgtacactgacgttccccgctgtcccctggttcagtcccaggcgggtcatttccaggcaagtgtcaataatctgacgagcaagtttatttcgttccattagctacctctctctgattcaaaacagggcaataatgttgttcctttcacactattgaattagccgtttaattacccaccatcttcttcctgattaacaagaaagaaattcacaagcttatattttgtgacctggttcaactaatcacagtaaataactgcaagttctctttttataaccccattaaaaatgaccgctcttaaaaatatttatcaaaacggtcatttttctattcctccaagcccggaatgaccgttttcggcacaaacaattaatacggtcatctgatttgtgttttttatgatttattttctgaaacgggcatgaaatttcgattattaaagtgatggtagtcacataaagtcaccttctagctaataagtgtgaccgccgtcatattacagagcgttttttatttgaaaatgaatccatgagttcatttcagacaggcaaatattcactgatatgaagcccgaactcgctggttttgcacttttgaaaacataaccgattacgtgcttaagcttctgaacctaagaggatgctatgggaaacacaagtatacaaacgcagagttaccgtgcggtagataaagatgcagggcaaagcagaagttacattattccattcgcgctgctgtgcagtctgttttttctttgggcggtagccaataaccttaacgacattttattacctcaattccagcaggcttttacgctgacaaatttccaggctggcctgatccaaagcgccttttactttggttatttcattatcccaatccctgctgggatattgatgaaaaaactcagttataaagcagggattattaccgggttatttttatatgccttgggtgctgcattattctggcccgccgcagaaataatgaactacaccttgtttttagttggcctatttattattgcagccggattaggttgtctggaaactgccgcaaacccttttgttacggtattagggccggaaagtagtggtcacttccgcttaaatcttgcgcaaacatttaacagctttggcgcaattatcgcggttgtctttgggcaaagtcttattttgtctaacgtgccacatcaaagccaagacattctcgataaaatgtctccagagcaattgagtgcgtataaacacagcctggtattaagcgtacagacaccttatatgatcatcgtggctatcgtgttactggtcgccctgctgatcatgctgacgaaattcccggcattgcagagtgataatcacagtgacgccaaacaaggaagcttctccgcaagcctttctcgcctggcgcgtattcgccactggcgctgggcggtattagcgcaattctgctatgtcggcgcacaaacggcctgctggagctatttgattcgctacgctgtagaagaaattccaggtatgactgcaggctttgccgctaactatttaaccggaaccatggtgtgcttctttattggtcgtttcaccggtacctggctcatcagtcgcttcgcaccacacaaagtcctggccgcctacgcattaatcgctatggcactgtgcctgatcagtgccttcgctggcggtcatgtgggcttaatagccctgactttatgcagcgcctttatgagcattcagtacccaacaatcttcagcctgggcattaagaatctcggccaggacaccaaatatggtagctccttcatcgttatgaccattattggcggcggtattgtcactccggtcatgggttttgtcagtgacgcggcgggcaacatccccactgctgaactgatccccgcactctgcttcgcggtcatctttatctttgcccgtttccgttctcaaacggcaactaactgaacatattttccgaataaagtgaggaatctgtaatgaaaaaaatcagcttaccgaaaattggtatccgcccggttattgacggtcgtcgcatgggtgttcgtgagagccttgaagaacaaacaatgaatatggcgaaagctacggccgcactgctgaccgagaaactgcgccatgcctgcggagctgccgtcgagtgtgtcatttccgatacctgtatcgcgggtatggctgaagccgctgcttgcgaagaaaaattcagcagtcagaatgtaggcctcaccattacggtaacgccttgctggtgctatggcagtgaaaccatcgacatggatccaacccgcccgaaggccatttggggctttaacggcactgaacgccccggcgctgtttacctggcagcggctctggcagctcacagccagaaaggcatcccagcattctccatttacggtcatgacgttcaggatgccgatgacacaagcattcctgccgatgttgaagaaaaactgctgcgctttgcccgcgccggtttggccgtcgccagcatgaaaggtaaaagctatctgagcctgggcggcgttagcatgggtatcgccggttccattgttgatcacaacttctttgaatcctggctgggaatgaaagtccaggcggtggatatgaccgaactgcgtcgccgtatcgatcagaagatttacgacgaagccgaattggaaatggcactggcctgggctgataaaaacttccgctatggcgaagatgaaaataacaaacagtatcaacgtaatgccgagcaaagccgcgcagttctgcgcgaaagtttactgatggcgatgtgtatccgcgacatgatgcaaggcaacagcaaactggccgatattggtcgcgtggaagaaagtcttggctacaacgccatcgctgcgggcttccaggggcaacgtcactggaccgatcaatatcccaatggtgacaccgccgaagcgatcctcaacagtagttttgactggaatggcgtgcgcgaaccctttgtcgtggcgaccgaaaacgacagtcttaacggcgtggcaatgctaatgggtcaccagctcaccggcaccgctcaggtatttgccgatgtgcgtacctactggagtccagaagcaattgagcgtgtaacggggcataaactggatggactggcagaacacggcatcatccatttgatcaactccggttctgctgcgctggacggttcctgtaaacaacgcgacagcgaaggtaacccgacgatgaagccacactgggaaatctctcagcaagaggctgacgcttgcctcgccgctaccgaatggtgcccggcgatccacgaatacttccgtggcggcggttactcttcccgcttccttaccgaaggcggcgtcccgttcaccatgactcgtgtcaacatcatcaaaggcctgggaccggtactgcaaatcgcggaaggctggagcgtggaattgccgaaggatgtgcatgacatcctcaacaaacgcaccaacagtacctggccaaccacctggtttgcaccgcgcctcaccggtaaagggccgtttacggatgtgtacagcgtaatggcgaactggggcgctaaccatggggttctgaccatcggccacgttggcgcagactttatcactctcgcctccatgctgcgtatcccggtatgtatgcacaacgttgaagagaccaaagtgtatcgtccttctgcctgggctgcgcacggcatggatattgaaggccaggattaccgcgcttgccagaactacggtccgttgtacaagcgttaatacattactccctgatgtgatgcccggtcgctccggctaccgggcctgaacaagcaagagtggttagccggataagcaatgttatccggctatattgcaggagcgattatgaaacaagaagttatcctggtactcgactgtggcgcgaccaatgtcagggccatcgcggttaatcggcagggcaaaattgttgcccgcgccagtacgcctaatgccagcgatatcgcgatggaaaacaacacctggcaccagtggtctttagacgccattttgcaacgctttgctgattgctgtcggcaaatcaatagtgaactgactgaatgccacatccgcggtatcgccgtcaccacctttggtgtggatggcgctctggtagataagcaaggcaatctgctctatccgattattagctggaaatgtccgcgaacagcagcggttatggacaatattgaacggttaatctccgcacagcggttgcaggctatttctggcgtcggagcctttagtttcaatacgttatataagttggtgtggttgaaagaaaatcatccacaactgctggaacgcgcgcacgcctggctctttattagcagcctgattaaccaccgtttaaccggcgaattcactactgatatcacgatggccggaaccagccagatgctggatatccagcaacgcgatttcagtccgcaaattttacaagccaccggtattccacgccgactcttccctcgtctggtggaagcgggtgaacagattggtacgctacagaacagcgccgcagcaatgctcggcttacccgttggcataccggtgatttccgcaggtcacgatacccagttcgccctttttggcgctggtgctgaacaaaatgaacccgtgctctcttccggtacatgggaaattttaatggttcgcagcgcccaggttgatactagcctgttaagtcagtacgccggttccacctgcgaactggatagccaggcagggttgtataacccaggtatgcaatggctggcatccggcgtgctggaatgggtgagaaaactgttctggacggctgaaacaccctggcaaatgttgattgaagaagctcgtctgatcgcgcctggcgcggatggcgtaaaaatgcagtgtgatttattgagctgtcagaacgctggctggcaaggagtgacgcttaataccacgcgggggcatttctatcgcgcggcgctggaagggttaactgcgcaattacagcgcaatctacagatgctggaaaaaatcgggcactttaaggcctctgaattattgttagtcggtggaggaagtcgcaacacattgtggaatcagattaaagccaatatgcttgatattccggtaaaagttctcgacgacgccgaaacgaccgtcgcaggagctgcgctgttcggttggtatggcgtaggggaatttaacagcccggaagaagcccgcgcacagattcattatcagtaccgttatttctacccgcaaactgaacctgaatttatagaggaagtgtgaaatgctgaaaacaattagcccgttaatttctcccgaactattgaaagtgctggcagagatgggacatggagatgaaattattttttccgatgctcactttcccgcccatagcatgggaccgcaggtgatccgcgctgatggcctgttggtgagcgacttgctccaggcgattatcccgttatttgaactggacagttatgcaccgccgctggtgatgatggcggcggtagaaggtgacactctcgatcctgaagtagaacgacgttaccgtaatgcgcttagtctacaagccccgtgtcctgacatcatccgcatcaatcgttttgcgttttatgaacgggcgcaaaaagcctttgcgatcgttatcacaggcgaacgagcgaagtacgggaatattcttttaaaaaaaggggtaacaccgtaatctcataccggtacgcccgcatgacgcgggcggttatcgaatgatggggtgaaaaatatgaaagcggcacgccagcaagcgatagtcgacctgctgctgaaccataccagcctgaccacggaagctctctctgaacagctaaaggtcagtaaagaaaccattcgtcgcgatctcaatgaattacagacgcagggtaaaattctgcgcaatcatggacgcgctaaatatatccaccgtcaaaatcaagacagtggcgatccctttcacatcaggctgaaaagccattatgcgcataaagcagatatcgcgcgcgaggcgctcgcgtggattgaagaagggatggtgatagccttagacgccagtagtacttgctggtatctggcacgccagttgcctgacatcaacattcaggtcttcaccaatagccatccgatttgccatgaactcggtaaacgcgaacgcattcaactgatcagttccggcggcacacttgagcgcaaatatggctgttacgtcaatcccagcctgatttcccaacttaaaagcctggaaatcgatctgtttattttttcttgtgaagggatcgatagcagcggcgcactgtgggactccaatgcgatcaacgctgattacaaaagcatgctattaaaacgtgccgcgcaaagcttgttattgattgataaaagtaaatttaatcgtagtggggaagcccgcatcgggcatctggatgaggtaacgcacattatttctgatgagcgccaggttgcaacttctttggtaacagcctgacggaaagggtagcaggccggagacgacgccccggccttgcctgttatcgctcgtcgcgacgaccacccaccgcagcccagatgcggcggacgtgcaccgtcacttcttcgcgatcgtgatacaactgccgcgcctgaatctgagcatttatgccatgttcatcaagctgtgcctgaatatacgccagattgtgactcacttcttcgtagcgttttttcatcggcagtttgaggttgaaaatggtttcacggcaccagccattaaccagccactgtgccatcaatgccgcaactttcgccggtttttcaaccatatcgcataccatccaggagatattgctgcgcgtcggacggaatttgaaaccgtcttcccgcagccacgtcacctgtccggtatccatcagactttgcgccatcgggccgttgtcgacggaataaacccacatgttgcgcttcaccagttggtaggtccagccgccagggcaagcgcctaaatccaccgcccacatcccgttcgccaggcgttcatcccactcatccgcaggaataaacacatgaaatgcctcttccagtttgagcgtggaacgactcggcgcatctgccggaaatttcaggcgcggaatgcccatatagaacgggctattattgttgctgtaactgtaaccggtatagcagcagcctggtgcaataaagaatacatgcacaaccggacgcttcggcgtttcatagttcgccagcaccccggcatcgcgcaaggcagcgcgtagcggaacagtaaatttacggcagaatttcagtaactctttgctttcgttggtatcggcaacttcaacacgcagttcaccgcccttctctactacgccctgtaacatgccgacaatgggggtaatacgatcttctggcggcaaatgctgcaggagttcccccaccacaaaccactggcgggcaaaaattaaactactgaacggcagctcacggattaacttatcgccatcatcaggttgataacattcataaatgacataacccgcattctctttcacgcgggcaaaaccgaaaatttcccgctggccggctttatcggtaatttctgcggcgcactctttttcaaagcccggacggcacagcaatacaaccttattcatgacttacgcccttgcgctttaaacggatagcaccaactaacattaacgcccagcccgcgaggaagctcacgccgccaaccggagtgacaaacgcccacaaacgcagatgggacagcgccaggcaataaaggctgccgctgaacaacaccgtgcctaacgcgaggaaaacgctactccagtaaaaccagatactgatgcgacgctgcattgccaccgccagacctaagatcgccagcgtatgaaacgcctggtattcgaggccggtctggatccagcccatctcaacggcccccatggttttacttaacacatgcgcgccaaaagcgcccagagccacaaaaatgaagccgctaatggcggcgaaaatcagcataaaacggctggtcatggtcgtaccctacgtaaattattgttcataacgaaagcggaatttttcttgttcagcagcggctttcgccaggatccattggcgaaaggcggctattttacccagttctgcctgactgtcatgacaaaccagataaaaagcatttttactgaccagaacatcattaaacgggcaaacaagacgtccggcctcgatttcagattgcgccatcacgttatttgccagcgccactccctgcccgtggatagccgcttgcagcaccatggcgctatggctaaaaattggcccttgctgaacgttgatatgatttaaccccaactgtcgggtatatgtctgccagtcacggcggctagcatcatgtaataacgtatgtttagccagatcttccggtgtcttcaagggtttttcgccagtcagcagtagcgggctacacaccggcaataaatattcggcgtacagtttttccacccgtagccccggccagttgccccgaccataaaatatcgccacatcaacatcatccgccagcttatcttcctgacgatcaaccgcctggattcgaacgtcaattcccggataagcactattaaagctggaaagtcgcggaaccaaccaatgaatggcgaaactggggagtaaactgaccgtcaacgcccccttggcgctacgggcctggagtttacgcgtcgcttcggttaattggctaaatatctctttgatatcgaggaaatagctttgcccttcctcggtcagcaggagactacgattacggcggcggaacagttttagccccaaaaaatcctcaagagacttgatttgatgacttactgcggcttgggtcacaaaaagctcttctgctgcgcgagtgaaacttaaatggcgtgctgcggcatcaaaaactcgtaaggcatttagcggtggtaatcgtttagacatggctattaaactttgatgttaaatgaatttaacaattagatcacactatgtaacctattagtttttttaatctgagccattataaattgtccgttgagcttctaccagcaaatacctatagtggcggcacttcctgagccggaacgaaaagttttatcggaatgcgtgttctggtgaacttttggcttacggttgtgatgttgtgttgttgtgtttgcaattggtctgcgattcagaccatggtagcaaagctaccttttttcacttcctgtacatttaccctgtctgtccatagtgattaatgtagcaccgcctaattgcggtgcttttttttaccttgcgatcgcgaattactgatccagttcgaccatctctttcacgtcagtacggttgatctgctgtttgttgccattagcgtctttatagctaatcataccggtatcgttatcagtctgtggtttgccgtcagagacgatggtacgtccgtcattggtgtgcatcacatagttgctaccggaacaggcgctcagggcaaaagtcagcatacaggcagaaataattgcggcagtctttttcatcatcttctccttaaagcgattaataaatcttaatagtattgattaacaggctaaaattaacgcctaacactattcagcatatgttacttacgcggcttcgccaggatatccagataattctgatggttagcactctccttgtatcaaagtgaattttgcgtcacgatcggtgcatcaagccgaggagtaccatgaacgtttttaatcccgcgcagtttcgcgcccagtttcccgcactacaggatgcgggcgtctatctcgacagcgccgcgaccgcgcttaaacctgaagccgtggttgaagccacccaacagttttacagtctgagcgccggaaacgtccatcgcagccagtttgccgaagcccaacgcctgaccgcgcgttatgaagctgcacgagagaaagtggcgcaattactgaatgcaccggatgataaaactatcgtctggacgcgcggcaccactgaatccatcaacatggtggcacaatgctatgcgcgtccgcgtctgcaaccgggcgatgagattattgtcagcgtggcagaacaccacgccaacctcgtcccctggctgatggtcgcccaacaaactggagccaaagtggtgaaattgccgcttaatgcgcagcgactgccggatgtcgatttgttgccagaactgattactccccgtagtcggattctggcgttgggtcagatgagcaacgttactggcggttgcccggatctggcgcgagcgattacctttgctcatagtgccgggatggtggtgatggttgatggtgctcagggggcagtgcatttccccgcggatgttcagcaactggatattgatttctatgcttttagtggtcacaaactgtatggcccgacaggtatcggcgtgctgtatggtaaaagtgaactgctggaggcgatgagcccctggctgggcggcggcaaaatggttcacgaagtgagttttgacggcttcacgactcaatctgcgccgtggaaactggaagctggaacgccaaatgtcgctggtgtcataggattaagcgcggcgctggaatggctggcagattacgatatcaaccaggccgaaagctggagccgtagcttagcaacgctggcggaagatgcgctggcgaaacgtcccggctttcgtagtttccgctgccaggattccagcctgctggcctttgattttgctggcgttcatcatagcgatatggtgacgctgctggcggagtacggtattgccctgcgggccgggcagcattgcgctcagccgctactggcagaattaggcgtaaccggcacactgcgcgcctcttttgcgccatataatacaaagagtgatgtggatgcgctggtgaatgccgttgaccgcgcgctggaattattggtggattaatgacaaacccgcaattcgccggacatccgttcggcacaaccgtaaccgcagaaacgttacgcaataccttcgcaccgttgacgcaatgggaagataaatatcgccagttgatcatgctggggaaacagcttccggcattgccagacgagttaaaagcgcaggctaaagagattgccggatgcgaaaaccgcgtctggctgggatatacagtggctgaaaacggcaaaatgcatttctttggcgacagcgaagggcgcattgtgcgcggcctgctggcggtgttgttgactgccgttgaggggaaaaccgccgccgagttgcaggcacagagtccactggcattgtttgatgagctgggattacgtgcgcagcttagcgccagtcgcagccaggggttaaatgcgttaagcgaggcgattatcgctgcgacgaagcaggtttaagcacagaaccgggtcggataagacgttcgcgtctcatccgacctgattgtttaaccctgacgcgccgctttcgccatcatcttcttcagcgcatgagaaaccgcaacaaacccaaaggtggcggtcaccatcgttgccgcgccaaatccagatgcacaatccatccgcttcggcccttctgccgtggctttcatcgcacacaccgtaccgtcactctgcgggtacaccagcgcttcagtagaaaacacgcaatccacgccgagcttacctttactgtttttcactacgccaaaatcgcttttcaggcgctcgcgcaacttcgccgccagcgggtcctgaatcgttttcgccagatcggtaacctgaatctgcgtcggatcaatctgcccacccgcgccaccggttgtgaccagtgggattttattgcgccgacaataagcaatcagcgccgctttgggccgtacactatcaatggcatcaatcacgtagctataacccacgctcatatactgcgctacgttatccggcgtcacgaaatcatccaccaccgttacacggcactccgggttaatctggcgaatacgctccgccataacttccgcttttgccagcccaacgttatcgcgcagggcatgaatttgccgattggtattggtgacgcacacatcatccatatcgataagcgtgattgcgccaatccccgtgcgcgccagcgcttccgccgcccaggaaccgacaccaccgataccaaccacacaaatatgcgcgtcagcaaacagttgcaacgctttttcaccatacagacgcgctgtgccaccaaaacgctgacgccatgcatcactaattaccacagacatagcacctcagaattaaaaagggcgaggttatccctcaccctaaacgcataaatgcctgatgcgctacgcttatcaggcctacataactcctgcaatattttggatttgcatgatttgtaggccggataaggcgttcacgccgcatccggcatgaacaacgcgcacttagtcaataatcaggatgtgaggttacccctcaccctgtcatatccgtaaaaacggcatacagaatatcacatcagccgctaaagacgttacctgcgcccggggcggttttcagcacccagacacgtccatagtggttgtaccaacctgcgcggtgtccggcttccggcccgatcccttgatagatatcgaagtgttggcctttgattgcaccaccgacatccagcgccaccatcagacgcagttcgtactgaccattaaatttgccgttattatccagcaacggcacttctgccagcaaggtagtacctggcggaataatggaacgatcagaggcaacactcgcgcgaccaaccagcggcaccgcacttgcccctttcaccggagcaaaagattgcggtttaaagaagacgaaagacgggttctgttccagcagctcgcgaacctcggcttcactgtgtgtttcgccccagtgacgaatcgcctgcatgctcatatcttcttttttcacttcgccacggtcgatcagcaccttaccaatgctgcgataggcatgaccgtttttccctgcatagctgaaaaagttaagcggactgccatcaccaaagtcgatatacccactaccctgcacatccataatgaagttatccatcagggagttactgtaagcgagaatatatttatcactcaatgcccccgcgtagatctccgcacgagacggcagacgaccacgttttggcggcatacggtaaataggatactggaactcgccctggcgggtatggcgcgcctgaattaccggcgtgtaataaccggtaaactgcacgttaccatagttgtcggcaccttccatctgccaggcatcaatgccgaactggcgcatattgcgggtatcaccgcctgcgcgcagccactcttgcaccgcgttataaacattactctggttgccatacagacgcggactgctattacggatatggttaatttgctcggcaaaatcaccggcgttaatcggcgcgccaacggcatctggctggttcaccagagagaaaggctgggtaaatttcccgtctttatattgctgtccgcgatcggttggtttggaagagcaggcggcaagcattgccacaaccgtgcccataagaaggtactttacccaacgtcctttcattgttctcttcttcaggttaaaaaataaggcgcaacgaagataacaaaccgccgcgtttaatgaaatgagcagcctctccctgacgcaaattttgcacaaaaaataggctttagtgatttgtttttgttcaaaatcatgccaaatccgtgatcggggtaaaaaaaaggttgcatgaaaacgcgagcggagtatagtgcgcatccacggacgcggggtggagcagcctggtagctcgtcgggctcataacccgaaggtcgtcggttcaaatccggcccccgcaaccaattaaaatttgatgaagtaaagcagtacggtgacgcggggtggagcagcctggtagctcgtcgggctcataacccgaaggtcgtcggttcaaatccggcccccgcaaccaatcaaatttgatgaagtaaaagcagtacggtgacgcggggtggagcagcctggtagctcgtcgggctcataacccgaaggtcgtcggttcaaatccggcccccgcaaccaattattgaacaccctaacgggtgtttttttgtttctggtctcccataaaaaagcgccattcagcgcctttttatcatccccttctcgccagcgtcgccccatcggcaaaatacgctttaatccccgcaagaatagactccgcaacttcctgctggaaagtcgccgttttcagtttacgctcttcctcaacgttactgataaacgccgtttcgaccagaatggagggaatatctggtgcctttagtacggcaaacccggcctgttcaacttgatttttatgcagcttattgattttaccgagcttattcagtaccgctttaccaaacttcaggctgtcggcaatggtcaggctctgtaccatatcgaacatggtgtggtcgacatagcggtcaccgcttttgctcacgccaccaatcaagtcgctggcgttctgggtttgtgccagatattttgccgcagtactggttgcacctttggtactgagcgcaaacacagaggaaccgctcggctgacgactggtaaaggcgtcggcatggatagagacaaacaggtcagcacgctgtttctgggcttttgctacgcgcacttgcaatggaatgaagatgtcttcattgcgcgtcatgtacaccttcatattgccctctttctcgatcagagagcgcaaacggcgagctatttgcaataccacatctttttcgcgcgttttgtatttccccaccgcaccggagtcttcgccaccgtggccagggtcaagcataatgacaatcggacgatcgcgccctgctttacccggttgtggaccactttgcgctggcggcacctgcttttcgaggtcgcctttgttgtaatcctccagcagcgccagcagcgggtcctgcatatcctgtgcattggccggatagaggtccatcaccagacgctctttaaacccggcgaccggcgcaagggcaaacagctgcggttttacgttttgctttaattcaaaaaccatccgtacggtttgcgggtcaaattgcccgacgcgcgcgctcttgatgaacgggtcgtctgcacgaatttgtgccgccatccccttgagtacgctgttcaggtttacatcttcgatatccaccaccacgcgttcagggttactcaacgcgaactgcttatatttcagctgacgattactttccaccgtcacgcgggtgtagctggacgcaggccagacgcgcaccgccacgacctggctgaccgcagccagactgacctgacttacgctcaatagccacatggcacccgcgccttgcagtaaacgacgacggctgattgcagtgttggatccactcatgcctctcccgagcaaaagaaatctaagctgtgtaacaagtaaacgactaatttgaccggaaactttagcgaaagacgcataatctgtcatctaataaacggtaaacattctttttatattcacggcattactgataaaaaagtcgctctcgcataaaatttacacttgcaccctgcgaaaaaacagaataaaaatacactaatttcgaataatcatgcaaagaggtgtgccgtggtaaaggaacgtaaaaccgagttggtcgagggattccgccatagcgttccctatatcaatacccaccggggaaaaacgtttgtcatcatgctcggcggtgaagccattgagcatgagaatttctccagtatcgttaatgatatcgggttgttgcacagcctcggcatccgtctggtggtggtctatggcgcacgtccgcagatcgacgcaaatctggctgcgcatcaccacgaaccgctgtatcacaagaatatacgtgtgaccgacgccaaaacactggaactggtgaagcaggctgcgggaacattgcaactggatattactgctcgcctgagcatgagtctcaataacacgccgctgcagggcgcgcatatcaacgtcgtcagtggcaattttattattgcccagccgctgggcgtcgatgacggcgtggattactgccatagcgggcgtatccggcggattgatgaagacgcgatccatcgtcaactggacagcggtgcaatagtgctaatggggccggtcgctgttagtgtcactggcgagagctttaacctgaccagcgaagagattgccactcaactggccatcaaactgaaagctgaaaagatgattggtttttgctcttcccagggcgtcactaatgacgacggtgatattgtctccgaacttttccctaacgaagcgcaagcgcgggtagaagcccaggaagagaaaggcgattacaactccggtacggtgcgctttttgcgtggcgcagtgaaagcctgccgcagcggcgtgcgtcgctgtcatttaatcagttatcaggaagatggcgcgctgttgcaagagttgttcagtcgcgacggtatcggtacgcagattgtgatggaaagcgccgagcagattcgtcgcgcaacaatcaacgatattggcggtattctggagttgattcgcccactggagcagcaaggtattctggtacgccgttctcgcgagcagctggagatggaaatcgacaaattcaccattattcagcgcgataacacgactattgcctgcgccgcgctctatccgttcccggaagagaagattggggaaatggcctgtgtggcagttcacccggattaccgcagtagtagtaggggtgaagttctgctggaacgcattgccgctcaggcgaagcagagcggcttaagcaaattgtttgtgctgaccacgcgcagtattcactggttccaggaacgtggatttaccccagtggatattgatttactgcccgagagcaaaaagcagttgtacaactaccagcgtaaatccaaagtgttgatggcggatttagggtaagcgatgaaaatcgtcggatgcgacatgcgtaacactcgtacgtcgcatccggcaattacgtttattcccgactactaaacaacgccgccagaccactgcgccgctcagtacgagtggcgattgccgcacttaatatgcgctcatcggcatacaggctcagacggcgacgcgcgcgggtcaccgcggtataaaccagctctcgcgttactaccggcgtgcgttggctcggcaaaatcaacgccgcatggtcgaactcgcttccctggcttttatgtaccgtcatcgcccacgtagtttcgtgctctggcaagcgactcggttgcacagacttaatattgccgtccggcatcgcaaaccagacgcgcgtcccctgcccgcgatccagcgcaataccgatatcgccattaaacaacccaagcgcgctgtcattacgggcaatcatcaccggtcgaccttcgtaccaacgagagtgcggatgacgatgaattttgcgcttctgttgcataaactgctcaattcgctcattcagtccagccacgccaaacggcccttcccgcagggcgcacaaaagctggtactcattgaacgcctgaatgattaaatccggctcggcacgcgcttgcagcagatccagataacgtccgtaacccgcaagagcttcctcaagcatcgcaatataatcttcgccgctctgtaaaagccgtttttcgatatcagtaaaatcctgctgaaaaacggttttcactgccgttttatcaccacggttgatcgccgcagctaactgaccaatgccagaatcgctgccgaaacgatagcttttttgcagcaggcagagactgtcgcgcaaagatgccgcttctgtgccggttcctgccggaacgtgagtccccgtcaggcggcttagctgcctggcacgctcggcggtaaagcccgcgttggcataagcgcagatatcgcccagcacagccccagcctcaacgctggccagttgatcacgatcgccgagaaagatcactcgcgcatgatcgggcaaggcgtcgatcagtctgctcatcataggcagatcgatcatactcgcttcatctaccaccagcacatcaagatgcagcgggttaccggcatgatgacgtaaacgctggctacccggctgcgcgcccagcaatcggtgcaaagtgctggtatcttccggaatgcgtttcttttgttcatcggtcagcggtaactgtcgcaaagccttgccgagagattcggttaagcgcgcggcagctttacccgttggtgcagccagacggatacggcagcgttcgccgtcggccatttgaattaacgctgccagcaacttcgctacggtggtcgttttaccggtgccagggccgccggaaatcacgctgatccgccgcgtcagcgccactgccgccgcaactttttgccagttaatttcatcgcttactggaaaaagtttgtccagggtttgcgccagtagagcttcatcaacctcaatggcatgattcacttcgttgaaaaagcgtgccactgtgcgctcgttacaccacatgcgattcaaataaagacgatcgccacagaggatcatcggcgtgggttcatctcccctgctgaccgcttgagaagccagcaagcattcttcccaattttgtagctcaccgatttcactgacacaggtcgccaacagcggatggctcgcctcgttattttccagtcgactaagcggcaaacaaacgtgtccctctccggcatcatgacttaacagtgccgccgcgagggtgacggcaggatgttcatctcccgccacggtcagggcaaattgcacatccagcgggcgtagctgtttgtgctccacagcttccagtaattgcttttgcaatttcattacgcctcctccagggtcataccggcaaacatctcatccatcagggcaatcaacccggcgttgggtcgggttgtgtaaatcccctgttgcggatgttctttatcaacgccacgcaggaacagataaataacgccgccaaagtggtgctcatagtcgtaatcagcaatgcgatggcgcagataacgatgcagcgccagggtataaagctgatattgcagatcatagcggtgtgcctgcattgccgctgccatagcctgttgggtgtaagcgctactgtcttcacccaaccagttggatttatagtcgagcaggtaataacgcccttcgtggcggaacaccaggtcgataaagccttttaacatgccacgtacctgcatgaactccagcggcgggcagcctgcggatagcgggtcaaactggcggattaacgtatcaagctgactggcgataagcggttcactaatcggcagataaaactccatctccacctgtttattgcgggcggaaagttgactcaggcttacgccggtttcattgagaggtgcctggaggacagccgtgatccactcggtcaataccggttcccactggctttcaaagccgccgagttccagtttttcccgcacccagttcgggtcaaccggctgggtaaaatccaggtcttcaaacaaactgtgcaagaacgtccccggactcgcaccgcgcggaaactgatgtggtgttaacgtcggttcttcaacgacgctggcaacgcctgcagcatcgacatccagccgaggcatcaaatcctgggcgataccgtgaccacgctgttgcaaaccagagtagctggtgacgcgccagttatcgccgggcaatcgttgtaacgtcttcgcattcagctctgctgtagaaacatcattaacctgccagggttggttatcaccagtttgtgccgtttgccaggcaatatcatcatcgcataacgcttcaatacaggtgcgaagccctgccgcatcttgcggttcccctttttgcagcaaacgcccgagcgcactttggtggacgtcggtgtcaccttttttatcgccacgacggcgcaccagcggtgcaacgccgagactgcaatgccaaacgctacgtgtcagcgccacgtaaagcaaacgcagatcttccgccagacgttcggcctccgcgaggtcgacgctttctggcgcagcattaagatccagaactgcctcaaagctgtggcgatcgtgataaaacgcctgctcctggacgcggaaattggtgataaacggcagccagaccaatggatattccagccctttgcttttgtggatcgtgacaatctgcaccagatgtttatcactttcgagacgcatttgttggctggaggcattactgtctggctcgaggatatgttggcttaaccagcgtaccagcgcatgttcactttccagctgcgttccggcttcttgtagcagttcgctgatatgcaagatatcggtaagacgccgctcaccgcctgccgttgccagcaagttttcagcaatgttacgcgcgctcatcagcgcccgcagcatcggcataacgccacgtttgcgccagatttgccgataaccatcgaactcttcgactaccacatcccacgcatgttcgtcattgttcagcgtttcgatatccagcgcgttcagccccatcatactcgttgccagcgcactacgcagggtgttctcacgttcgggcgtcatcaccgcctgcaacaaccaaagcatttcctgcgcttccagagtttcaaaaacactgtcgcggttgctaaggtaaacggaagggatttccagcaacgttaaggcatcgcgcacctgggcggcctcctggcggctgcgcaccagcacactgatgtcgctagcacgcaccggacgcgcgtcgtcgccgttcatcagcaacgcttcgccccgctgtccggcttgtagccagtcgcggatttgcgcagcacatacctgcgccatggtactttgataatcgccaacgccgcagctttcgccttccatcagccacattttcatcgcaggctgtgtttcacctttaaatacaaaacgtaacgcctgatttttcccggcacttttcactggaataaacggtatttcgcgaaacatgaacgcgtcatcagtctggctgaaaagcttattcacgctgttcaccattcctggtgcggaacgccagttggtgtctaaagtgtagtgggcgtgaacttcgctacgcgccttcatataagtgaagatatccgcaccccggaatgcatatatggcctgcttcgggtcgccaattagcaacaatgcggtttccggctgatggtgccagatacggcgaaaaattcggtactgctgggggtcggtatcctgaaattcatcgatcattgccaccgggaatcgcgtacggatcgccgctgccaacacctcaccgctttcgctacgcagcgcggaatcgagccgacttaacatgtcatcaaaacccaattcgccacggcggcgtttttcacgcgctactgtttcgcggatctcagccaatgcgcgggtgatcaccagatcgcggatgctcaatggttctgcaagcagttgatcgatcgcctcaaacagtggatgtcgcggggtttcccccccggccttcgtgcgatcttctaagaaacgctgggagaatttttccaggctctccggcaactgataactgtttgtctcttcttctgcccaggcgctgatcttgtcgatccatttagcctgattgctacggttaaacttgcgtcgatcaataccagaagattcgatcagcgcatccagttcacccactgcgtcgcgccactgctgttttaccgtatcaatacgcgccacaatttgcgcgtgacgggaagccagcgtttcatcatcgggcggcggtgctttgataaccggcgcttcgccttgcagataacgattaatatcgcgcagcaacgcctgcggccctttccaggtttcaaagacgacctgggctatttcacgcggcagcgggtagcagtggcgacgccagaaatcggcgcaggcctggtagcgtagcagagactcatcttcaatcagctgctgctcaaacagcatgccggattcaaaggcattcaggttgagcatgcgctggcaaaagccgtgaatagtaaagactgccgcttcatccatctgccgttcggctaacaacaaccactgcgcggcttgcgctttatcgtcgatctcttccagcaggcgttcgtacagtggattgtcggtggtttcacgcagacaggcgatgcgcaactcgtggatattgctacggatacgaccgcgcaattctgccgtggcagcctcggtaaaggtgaccaccagcagttcttcaacggtcagcgggcggggaaaggcggcggaaccgcctagtccaagtaacaggcgcaaatagagcgccgcaatcgtaaaggttttgcctgtgccggcagaggcttcaatcaggcgctcaccctgtaagggcaagcgcaaaggatctagtgtctcggcgacatcactcattcttttcactcatcaggggcattgtttgctgcaacgcgctgacgttctcccacactttccagccttcagggtgtacatattcggctttcccgttctggctgccggaaatctggctcagaatagccatgccttgcggctcgaccaccgcctgatggaagaaatcagcaagtttttgcggcgtcagcagttttatctgggccacgattttatcacggctatcgaagcgcatattgccgcgatcgaaatctttacttaacttgcttgcttcttcgccgagcgtttgcggtgcctgcagcatctgggtaattaccgcctgctggatttgcgcaaactcatctggcttcatcgctcgcaattttgcctctgcggttgggaaaaacgccttgtaacgctcccacaagaaactaggctgtttatcattgctttgcaaaaggaagcccatgccccactgacgccccacgctcattggaaacgcaaacacggcatagcccaattgttcttcggtacgcaactgattgtagaaccacggctgtacgatctgccccaacagagagctataggcactgctggtgtattcatcgtagccagtcggtacaaataccgctgccagtgcggagtcggtgctgttaccggctttttcaaagatgacggattgttttttatcgaccactacatctttgtttcgacaccactcactaccatcagcgcccaactgtttttgcacatcgcgtgccagcgttgttgcctgggcctcggtcatgttgccgataaccataaactctggtcgagccccactttttaaggcgtcgcgataggccagcacctctttcaacgtaatggagggcaaaattttacgccgttcatctcggctgaagtacggcacttggctgagcatctgcgcgggcataatcgcctgctcaaacgctttacccttttctgcggaatccatcatctggttataccaggacttcgcctgctcaagctgatcttccgtagcggtatagctaaagtacccctcgagcaatgcctggaacagctgcggcagacgctgggtgtaaccattagcattaaccataaggccgttgttagcgttggtggaaaaacttatgccaccaacgctcgcctggttgcttaactgatcaagcgccagccctgcgagataatcattgagcgcaaacatcacctgattgcgggcgctgtccatggctttcggattacgcaaaatcaggctgacatcagctttgggctcgctggcaaaataacggcttggcgcatacaccacgcgcagattgctctcatcaacaatcagctctggatggtcgtatttcttctcactcttaatcaggctgaaatcatcaggaatataagggttaagctctggcaaagagagcgcaatgtcggcggcttttttctgccagtcggcgaaagtttgtgcgctgattttatcgacctgatacggcgcatcgacaaagtaagccgttttgttgtgcggctctttcgggctgatataccagatacgcgcattctgcggcgtcatcatcgccagacgttcctttactgctttagcatcgtaccgatcggcaatattgactgcatccagcgtatgctcaacaggaacgcgaatcatggtatctgccagccattcgacgtaatccatatcacgggtgatgctcggataacggaagtcgatatccagcacattcgccagttcatcgaagtattgtttatcaatgcctttttcacgtaacagattgagatagctaaaaattgccgccacaacctgatcgcgattagccaggcctttatcggttaaagacgcagagatcgctaatacgccgctgttgccgttgacgataggatcggagttggcgctaatgccctcaactaatccctgcttttgcagccagtcagaaagtgtacctgggctgcgattgccaatcagataggtaatcaattcatcggttttactacggaacttcgcactgttgttatcgatgcgaaactcaacgcgcaacactttacgcggcagcgcagggacgtaatgaatgataatgcccttttgcgcgtcggtgactaccggcacggtgatttccggttttttgctctctttgttcggcacgcgaccaaaggtgtccgccgccatttttgccaactccggcagcggtttattactgtaaataaccgccttcatcaaattggcggaatagtacttctcgtggaaatctttcagcgcctgctgcaccggattaccaggtttgtcgcttaaagtttcgaggttaccaccagaaaacttactaccggggtgtgccgggttaatggtttctgcgctgacctgtgccatgcgcatcccgtcacgcgtacgcgccatggttaattcagcgttcaccgcattacgctcacgttcggcatatttcttgtcgagcaaaggttcagcaatagcatcggccaggcggtctaccgcaccaggcaaggcgtcgttctcaacttccagatagaaagccgtgcgatacggcgcagtgctggcattgtgactaccgccgtgcattttgagatattcggccagactgtcagcctgcgggtactttttgctccccatcagactcatatgttcaaggtaatgtgccagcccctggtacgcctcgggatcttccaggctcccaacgggcaccaccagcgcgctgaggcttttaactgcctgcggatcagaaaccagcaagaccaccataccgttatccagacgtatagcctgatactggcggttatctttatcacttttacggatggtttcctgaatcggctgccatcccgtttctgcctgacttaagggtgcccaaagggcaactaacaacaataatgctttgaaccaggtgctgcggggcattcacggacctcataatcaacttaattttctgtccagattcaacacgttaacgcaaatcatctgccagaatttaatcttgtgctgcacgagtcagcctatgtttatataaccatcagtccgtgactggtgcgcatcataaagtaagcggatagattgcgcaatttttatacagcactcaactctgattaaagcgaaacagcggtaacaggaaacgttggctctgttcaacgatggcctccattgtctctggtgttaattgccgccagagcctttgataccagatatcatcaccttcgccacgcaccatcatgttgccttcgtaagcctgaaggaatttcgtacgggctttttgcaacgtggaatcgtcatccagcatggcatcgttttgcgcgtcataacaggtttttagccacgcgccgccactttcaggtaacaccagcaatggcgcggacattccttcacgatacccctcaatcagttgactgaggtaatgcaaagcctgttcggctgcaagcggcggaaaacgccactcgccgtctttgcgtagaaaaaggcgactttcaccattaccaccgctggcacagtagacaaggtgttccagccaaagttgcattccctgggccacacttaataaagagggacgccagcgcaacaggccatccggctgcacctgcggcaaccagccagttatctgcacaccgttgcaggcgagatcaatttccatactctgccccggctggcgacaggcaatgactctgtcggcaagctgctgcatctcctggcactgtgtttcccagaaaatttcaccaaaagcgccatacggtaaatcccctgccgctcggaagcggcggaacaagcgttcggcatcatcctgctcaaccagtgcattcaataactgctgattgatttgataacggctaagtccttccagaataaatggctcggtgtcggggatttcgctgtcttcagtacggaagttcacctgcaaacgcatctggaaaaatgcccgcaccggatgtgcccagaatcgttgtagcgtttccagcggcacggtttccggtaaggtaaacggcagcggctgaacaaattcagaatgtgctttaccagcctggctggccgcaggtagccattcacgagcatagctttgtcgttcgcctggctggtagttttgtggatcaaacggcatccgggtatggaggcaagtaagatgcgcttttacccttgcctcgctttcatcacagttgagcgcttcatcgcccggtagataatgactttgcccgatgtagtcgatcagttcctgcaccagtacgctcgggaaacgctcactgttatcctgaatggaacgaccgatatagctgatatagagtttttgctgcgcggaaattaacgcttccaggaacagatagcggtcgtcatcgcgacggctacggtcgccacgcttcggtttctggctcatcaggtcaaagcccaatggcgcaagctgacgtggataaacgccgtcgttcattcccagcaggcaaaccactttgaacggaatactacgcattggcatcagagtacaaatgttaaccggtccggcgagaaaacgctggctgatacgttcttgatccagacgctgtgccagttcatcacgcaatagactcagcggcaccgcgtcgccatactgcgcacctaaaccttcggcgataatcgcctgccattgttgttcgatcagcgtcatcgccgcttcggtttccgcatccggcaggaagaaggcgttgagcatatcgcgacaaaccggcaaccactcttccagcggacgctcctgtgccagcccgcgacgccagatgtttagctgcattagcagactagccagatgccccaccagttctgcaattaagccgctgctttcatcataaggtagaacgctttgccactcgccctgcgcgctctccatcgcgtagcccaacaacatacgcgtcaggccaaatcgccaggtgtgttgtccggtggcggggagttccagctcgcgaacgttgtcgtcatctatgccccaacgaatgccggattcgttgacccactggcgtaaataacgcagcccttcttcggtgatgtcaaaccgcgccgccagcaccggcacatccagcaacgccagcacatcctcactcacaaaacgactgtcaggcagacttaacaggctgataaacgcttccagtaccggatgactctgccgcgcacgacggtcggaaatggcgtaaggtaggtaacgatccgcaggtgcgctaccaaacacagcctgaataaacggactgtagctgtcgatatcagccaccatcacgatgatgtcgcgcggagtaagtgtcgggtcttcctccagcatcgccagcaggcgatcgtgtaaaacttcaacttcacgctgcgggctatggcaaacgtggaaggtgatactgctatccagtggatcaagcgggcgtttgttatcgctacgggaaaactcttcgatgttcacaccagcaacggcgcggttttccagttccagaatgtcagactgaatgttatgcagcaggttatctggcgtgacatcgacaaaggcgtccagctcctggctgctctccaggtcagaaaggagataaatgtagtcgcgcccaagcttaccccaactagccagcagcgggttgccgacatcctgttcaccatcgctgttaaagagctgcccggcattttcgctatcacgaaatagcggcaattcgcgatcttcaaaactgtgtcgacgctgacgggtcagcagtttcgccagataagcaggatctttaatatcgccccagtaataacggcaggggttggtaaacaggagatggatttcaatatgtttacccagcgcctgtagcgcctggagataaacaggcggtaacgcggaaataccgcatataaagacgcggctaggtaaccccggcgggcaggtcgtcgcggactccagcgtttcgataaagcgctgatagagattggcgcggtgccagcgcggttgcccgagttgatgggtatattccaccagcgccttccacaacggggcttgccaggcctgtgcttctcccagcccttcaaccaaatgtcctgtttcccactgtgccagccagtccggacgatagaccagatactggtcaaacaggtccgccgctttactggaaagctggaacagttttcgcttgtcgctatcgtcagtcagataatgccgcaacagggtaaagtcttcgcgctccagcaattgcggcagcagagtcatcagtttccagctcatgctctgtttgttaaaggcgctctctttggggatttccggtaacacccggacgaacatatcccagataaagctcgctggcagcggaaaatcaatgtttgccgcaataccaaacttttggctcagggtcatttgcagccactgtgccataccggtactttgcaccagaatcatctctggttcgaaaggatcgtccagccgttcgcgttcgacaataaactccatcaacgcttccagcacgtccagacgattggaatggtagacccttaacatagcggctcctgattactgacgattcgggcaatgcaggcgggtcatctcgccttctctgcccccgggactaactagcgtaacgctgatgctgacacatcccgcctggcttgtctgcattcggttgacctgccagttggcaggtgggctaatcgcgcgcagttgcgtttgctgccagccatgccgccagagctgttggtactggtttctgctggcaagactgttcattaatgttcgctggaaaccgcttaacgcagtgacaatcatcaccatcaacaccatcgccaacattacctccggcaggctaaagccttgttgattcttcagggaagcactcataacgccctctctttcagcggttaaatcagggaagctgacataacgccctctctttcagcggacaaaaatcgctccagccgcgtgggctaaaaacaatgtttccatcaatgacttcgcctgttcgccacaagctaacgccttcataaccggcaatcaataaggcttcattatctgccagtaaacgcaaacaaacctgggcatcggtttcagcgtactggctgcactgaactgctggctgcgtctgccagcagtgcatttttccccacgccagcgcgctctgaacgatggcctggcggcgcaaactctgactttccatgctcacgcgagaggcaaaactgcgatcctgttggctcattccttgtaatagcaaactacccaaaaccagcagcatcaggaccagagccagactgctaacacccttttcgcggttcacaggttgaatcctgtcacgctatagctggcattcaccacggtttgcggttcagacttactggcagcacgcatattaaccgtcaacaccgggctgaagccgctgacatcctgacgtacgacctgaaaagtgtcgataatgatggcatccggattagtgactttatcccagcccttaccttcacaggatgtcgcaccgcgtagcgtttccagcacatgctccttcagacgaaatccaatctggtcggactcttttaccggttcgcgatcccagataccgttactgttcgcatcccactgcacaatgacacagtcaccctgtccgacaatttccagcccttcgccggtacagatgccatgacaataacccgccctctggagatgcttcgcgacggtaaatacccgcagccagatttcatcttccagcgccagcttacgggtgctcgttaaactttcacgctgtaacgcaggcagaaagcgtgccgcccccagcaacaatacgccactgatcgccatagcaatcaacacttccagcagagaaaaaccttgctcttttacaggcatccttctgtttctccttgctgacaaagccggagtcttccccacgggctaaccaccagccaccactcgcccgtactgtttttgaagcgaatatgcccggcccatgcggtattgcgcaggccaaagaaagcaaggctaggtgtcaggtcgctcatttcgacttcgggccagcgtggcacaaagaccaatggactactgccatgacaggtattggccccagcagcggaactcacaaggcaccataacgtcccctccctgataacgctgatactgtggtcgcggttatgccagttggcatcttcacgtaaatagagcaaatagtcccgcgcctggctggcggtttgccatagccgttggctctgctgccagtattgccagccatagagtccacttgcgcttagcatgaccaaaatcagcatcgcgaccagcgtttcaatcagcgtataaccacgttgtgttttcatgccggcagtatggagcgaggagaaaaaaagacgagggccagtttctatttcttcggcgcatcttccggactatttacgccgttgcaggacgttgcaaaatttcgggaaggcgtctcgaagaatttaacggagggtaaaaaaaccgacgcacactggcgtcggctctggcaggatgtttcgtaattagatagccaccggcgctttaatgcccggatgcggatcgtagccttcaatctcaaagtcttcgaaacggtagtcgaagatggattcgggtttacgtttgataatcaacttcggcagcggacgcggttcgcggcttaattgcagatgagtttgatccatatggttgctgtacagatgcgtgtcgccaccggtccagacaaaatcacccacttccagatcgcactgctgcgccatcatatgcaccaataacgcgtagctggcaatgttgaacggcaggccgaggaagacgtcacaggagcgctgataaagctggcaagagagtttgccgtctgccacatagaactggaagaatgcatggcacggtgccagcgccattttatccagttcgcctacgttccacgcactaacaataatgcggcggctatccgggtcgtttttcagctggttcagtaccgtagtgatctggtcaatatgacgaccatctggcgttggccaggcgcgccactgtttaccatacactggcccgaggtcgccgttttcatcggcccattcgtcccagatggtgacattgttttcgtgtagataagcaatgttagtgtcgccctgcagaaaccacagcagttcatggatgatggaacgcaggtggcaacgtttagttgtcaccagcgggaatccatcttgcaggttaaaacgcatctgatgaccaaaaatggaaagcgttccggttccggtacggtcgtttttctgtgtgccttcgtcgagcactttttgcatcagttctaaatactgtttcatggttcctcaggaaacgtgttgctgtgggctgcgacgatatgcccagaccatcatgatcacacccgcgacaatcatcgggatggaaagaatttgccccatgctgatgtactgcacccaggcaccggtaaactgcgcgtcgggctggcggaaaaactcaacaatgatgcgaaacgcgccgtaaccaatcaggaacaaaccactgacagctcccattgggcgtggtttacgaatatacaggttgaggataataaacagcaccacaccttccagcagcagctcgtaaagctgacttgggtggcgcggcagcacaccgtaagtgtcgaaaatggattgccactgcgggttggtttgcagcagcaaaatatcttctgtacgggagccagggaacagcatggcaaacgggaagttcgggtcaacgcggccccacaattcaccgttaataaagttgcccagacgcccggcaccaagaccaaacggaatgagtggtgcgataaaatcagagacctggaagaaggaacgtttagtacggcgggcgaagataatcatcaccacgataacgccaatcaggccgccgtggaaagacatgccgccgtcccagacacggaacagatacagcggatcggccataaactgcgggaaattgtagaacagaacataaccaatacgtcccccgaggaagacgccgaggaagcccgcatagagtaagttttcaacttcatttttggtccagccgctgcccggacgattcgcccgtcgtgttgccagccacattgcaaaaatgaaacccaccagatacatcaggccgtaccagtgaagcgccacgggtcctatactgaaaatgaccggatcaaactccggaaaatgcagatagctactggtcatctgtcaccacaagttcttgttatttcgctgaaagagaacagcgattgaaatgcgcgccgcaggtttcaggcgctccaaaggtgcgaataatagcacaaggggacctggctggttgccggataccgttaaaagatatgtatatgatccgcgttataaccctccgcgaatcagcccgcccatgccgcgacgctccataaaggctgcaacctgatggcgaacttcggtcgccagttgcgcttccagactacgctgcgcaagattttctgcttcggcataatcaatgcgccgcagcaggtattttgcccgcgctacagaacgtccgttcatagacagatggcgatacccaagcccaatgaggattgccacgcacatgggatcgcccgccatttcaccgcacaaacggagatcgattccatgtatttccgcttcccgggcgatcatcgccagagctcgtaacattgcaggatgaagactgtcataaatgttcgccacccgggtattgttgcgatcaacggccagaatgtattgagtcagatcgttggtgccaacagagatgaaatcgacccgctttgccagatgcggcagcataaataccatactcggcacttccagcatgatgccgatacgtggtttgggaatttcgtaaccgatcatctcctcgacttcacgtccggcacgttcaatcaggcggcgtgcttcatcaacttcatcgaggcttgtgaccatcggcaacagaatattcaggttgcccgtagcggcattagcacgcagcatcgcccgcacctggatcaagaagatctccggctgatcgagcgtaatgcgaatcccacgccaacccaggcatggattctcttcgctgatcggcatgtaaggcagctgcttatctgctccgacatccagcgtacgcaaggtgacgggtttatcattgaacatttgcagcatcccctgatactgcgccacctgttcttcttcgctcgggaaaccactttgcagcatgaatgggatttcagtgcgataaagaccgatgccatcaatacggctgcccagtttttcttcatgttccgggcttaaaccagcattgagcatgacttttatacgctcaccgctttttaactgcgcgggtaaattgacgtcatcttccgccagacggctaagctcaatctcttcactaattagccgctgatattcttgcagcagtaccggctccggatcgaccagcaattcaccgcgatagccatcaacgatcagcgtcctacgatgcagcacgctaggctgaatatccgcgcccatcacggtagggatccccagcgcacgtaccatgatcgcagcatgggagttggctgcgccatctcgcacgacaacaccgactaagcgatcctggggcagctcagcaagcgttgtcgcactcagttcatctgccaccagaatgaaacgttccggccaggcgttcggcccttgattagcgtcatcaagatgaaacagcaatcgctgacccagcgcacgtaaatcgccagcccgctctttgagatagttatcacttagcgcggcaaactgttcggcaaatttttcaatgaccgtttttaccgcccactctgccacgctgcctttatcaacctcggcaaacaattcgcgacgcagccgggtgtcgctaagcaggtggctgtaaagatcgaaaatagccgccgtttctttttgtgcaccggcggcaaagcgtttgctgtagcggcgaaactcgtttgccgcttcttccagcgccccggtcagtcgttcgcgttccagagccggatccagcgtacttgcctgatacacctgttccattaaaggtaacgtggcatcctgccagccttcggcaatcgccacaccaggtgctgccggtaatgcgcggattcgcgtctggcgatattgcccaaacaaggcagtcaactggctctgagaaagaatagctgccatctgggtggcaagcgtcaccaggaaggattcttcactttcgtcatactggcgcaactctcgttgctgtaccaccagtacaccaagcaactggcgacgttgaataattggtacgcctaaaaacgcgcggaaacgttcttcttttacggaggggatgtatttgaagctggggtgcttttgcgcatctgcaaggtttatcggttccgccagcctgccaaccaggccgacgatcccttcatcaaacgcgagcgttacagtgcgaccgcgtggttttttcagcccccgggtcgccatcaggtagtaacaacgtcgatcatgatcggccaggtagacgctacagacctcggtatccatcgcaagacagatgtcggtaaccagaatatttaacgcctcattcaggcgtggtgcgctggctaccttttcgactatttcgcgcaggcgagtgagcataattggcgtgacttaacctcttttacgtcgataagcagatgcgttttgtggttttggcgtattttcctgcagactcatcaccacactcgcgaactctttcattaccctacggtagacatcacgtttaaaactcaccacctgtctgaccggataccagtaacttacccatcgccagccgtcaaactctggtgtactgctggtttgcatattgatttctgcatcgccgctcaccagctgcaagagaaaccatttttgtttttggccgatacaaaccggcttcgtgtcccaacgcaccaaacgtttcggtaatttgtagcgcaaccagttacgcgtactagcaaggattcgaacgtctttgcggcttaatcctacttcttcaaacaattcacggtacatcgcctgctctgcggattctccggggttgattccgccttgcggaaattgccaggagtgctgaccaaatcgccgggcccacattacctgcccctggcgattacaaatcacgatacctacgtttgggcggtagccatcgtcatcaatcaccggactacctcaaaataaagctttatatacgaatgattgtttcatactccaggaagacggtaaaccactctctgcagggcattacacactaataacaattgaataactcacagttatgtgcagagttataaacagaggaaggggtggatagccgtttttattcaccttttctgtggatagagttgtgaagaactacggaattactacgggaaaacccggagcattctgaataagcccgatatagacattttaaaatattcattatcagtcaatgcattacatgtaattttagtaatgaaaaagagtaattcgtgacccaggtcacacctctcatttacgggttggcgaaagatcaaccaatgccgtatttatccacagaatgtgccactaagttaagcactgaaccactaaaaactggagtttcgtcgcacgtcaaggctgtaaatggaaacagtagtggaggtttttcacagttatcccagctttctgtggataacatggtgtaagatcctgtttattttcagtgaccagatttggaaaacccgttgcagtgttgcgcaactcgattaccggcaacctaaaaagcaatataaatcagagaattgaacaacgcatgtggaaaaagttacactgcgaatattcggcacataattgctgtttgttttttaatcaaggtatcatgacatgtcccaacctcgcccactgctctctcctcccgaaactgaagaacagttgttagcgcaagcacagcaactttctggttatacattgggagaactggcggcacttgtcgggctggttacgccagagaatttaaaacgcgataaaggctggattggcgtgttactggagatctggctaggtgccagcgcagggagtaaacctgagcaagattttgctgctctgggcgtggaacttaaaactatccctgtggatagtcttggtcgtccgctggaaacaacattcgtttgtgttgccccgttaacgggcaatagcggggtgacctgggaaaccagccacgtgcgccacaaactcaaacgcgtactgtggataccggttgaaggcgagcgcagcatcccgctggcgcagcgtcgcgttggaagtccgttgctgtggagcccgaatgaagaggaagaccggcagctacgcgaagactgggaagaattaatggatatgattgttctcggtcaggttgagcggattaccgctcgtcacggggagtatttacagatacgaccgaaagcagcgaatgcgaaagcgcttaccgaagccattggtgcccggggcgaacggattctgacgctgccacgcggcttttatttgaagaagaatttcaccagtgcactactggcccgtcattttctgatccagtaaccatcgctttgacctgccgctttccgggcatataattaccgcttcatttttttggcagggctttttagatgttatttgcatggataaccgatcctaacgcctggcttgcgctcggtacgctgacgctgctggagatcgttcttgggatcgacaatattattttcctttctctggtggtggcaaagcttcccacagcacaacgtgctcatgcgcgccgtctggggttggcgggagccatggttatgcgtctggcgctgctggcaagtatcgcctgggttacgcgcctgacaaatccgctttttacaatattcagtcaggaaatttctgcccgtgatttgattctgcttctgggtggcttgttccttatctggaaagccagcaaggaaatccacgaatccattgaaggtgaagaagaagggctgaaaacacgcgttagtagtttcctcggcgctatcgtgcagattatgctgctggatattatctttagcctcgacagcgtgattacggctgtgggtctgagtgatcacctgtttattatgatggcagccgtggtgattgccgtaggcgtgatgatgttcgccgcgcgcagcattggtgattttgtcgaacgccatcctagcgtaaaaatgctggcgctctctttcctgattctggtgggctttaccctgattctggaaagtttcgacatccacgtaccgaaaggttacatctacttcgcgatgttcttctctattgcggttgaaagcctcaacttgattcgcaacaaaaagaatccgctctgatactccgtacgctctcctgcgggagggcgtactcactccttttaccctcacagtttaagattttcctgctttcaagatatataacgtcggtttataaacagactattatcataggtaggccaaatgaggataaccggatgaaaaaatgggcagtaataatttctgcagtcggactggcgtttgctgtttccgggtgttccagtgattacgtcatggcgaccaaagatggccgtatgattttgaccgatggaaaacctgaaattgatgatgataccgggctggtgagttatcacgatcagcaaggtaacgcgatgcaaattaaccgtgatgatgttagccaaattattgaacgttaacaaataaggtcagcatccggctggccttaagatttttctctttcccttttcccttccctctgccatttttatattccttatgtcgtgattataaaaaggaaacggctatgcaatatcaccgtataccccacagtagcctggaagtcagcacgctggggcttggcacgatgacgtttggtgaacagaacagcgaagccgacgcccacgcacaactcgactatgccgtcgctcagggcattaaccttatcgacgttgccgaaatgtacccagtacctccgcgccccgaaacgcaagggttaaccgaaacctacgtcggcaactggctggcgaaacatggcagccgcgaaaagttaattatcgcctccaaagtgagcggaccgagccgcaataatgacaagggcatccgcccggatcaggcgctggatcggaagaatatccgcgaagcgctgcatgacagcctcaagcgcctacagactgattacctcgatctttatcaggtgcactggccgcagcgcccgaccaactgcttcggcaaactcggttatagctggacggattctgcgcctgcggttagcctgctggatacgctggacgcactggcagagtaccaacgcgcgggaaaaattcgttatatcggcgtgagcaacgaaactgcatttggcgtaatgcgctacctgcatctggcggacaaacacgatctgccgcgtattgtcaccattcagaacccttacagtctgttaaaccgcagttttgaagtaggtctggcagaagtcagccagtatgaaggggtcgaactgctggcctatagctgcctgggtttcggcacgctgaccgggaaatatctcaatggtgcaaaacccgctggcgcacgtaatacgctctttagtcggttcacccgctatagcggtgagcaaacgcaaaaagccgtcgcggcgtatgttgatatcgccagacgtcatggcctggaccctgctcagatggcgctcgcgtttgtacgccgtcaaccgtttgttgccagcactctgctgggcgcaaccacgatggatcagctgaaaactaacatcgaaagtttgcatctggagttaagcgaagacgtattagctgaaattgaagcggtgcatcaggtttatacttatccggcaccataagattaacgccggttaaaaccggcgttaaatattaatgacggcgctgccagatccacagcgccgttattgccagcgcaaacagcgcaccgaagccaatgccaatgggcacgaccgggatgcctatcattaccgccaggctgtaaatgcccagcatcaacaacatggcgctgttttcgccaaggttttgtactgcaatcgcattccccgccccgacgctttttttaccccgctcctgtagcaacgcattgagcggaacgacaaaaaagccccccatcacgccaatcagcatcaacaaggcataggctggcagcagctcgtgttgcagggaaaaaatcagtaccaccacgccaatcaaaatcccggctggcatacagcgactcacggtttccagcgtaactaacttcgctgccgcacctgcgccaaccacgataccaatcgctaccatcgcgttgagataggtgggcgtagcgttatcggtaatgcccagcgccaccggtacccacagcaccaacaggaaacgcagcgtgacacccgctccccagaataaactggtgcccaccaggctaaaacgcgtttcaccattgcgccataggctggtgcaggcattcaggaaactgcgggtcatgttgatgagattccaggactgccccggacgcgccgccgccagtttgggaatgtagatattggcaacgaccgcaccaccgtaggccagtgcgcatgcggccagggcgacgaggacatgccagtcagccagcacaccaccggctacggaaccgagcaaaatcgccgctatggtagaagcttccattaaaccgttagctttcactaacttactacccgtggttaattcgccgagaataccgtatttcgccggactataggctgcagcaccaacacccaccagcgtatagccgagaaacggattgataccaaagcagatactggctgcgcccagcagcttcaggccgttggcaaacatcatcacccggcctttggcgaagctatccgccacctgcccgacaaacggcgcaaaaagaatgtaagcacctacaaacaccatttgcaggatgggctggctccactccggatagaactgcgctttcagtaacgccagagtggcaaacagtagggcattatcgccaaacgcagagagaaactgcgccacgataaccgctttcatccccttgctccacaagctagtgttagtgtgcacactctcactcatcgtgttgttccgcttcgtctacccagcttttcaacgtgacaaagtcaggtttgccgctgccaagtaatggcatctgtttcagatagcgaatatcgcgcggtacagcaagctccggcacgccgtgctcgcgggcatactgttgcaacttatcgcgcgtcagttcgttatctgtggtgaaaagcaccagtgcctcgcctttgctggcatcgctcttaatcgcagtggcatggactttatctgggctaacaccaagtgccagttgttccaccatttccaggctcaccatttcgcctgcaattttggcaaagcgttttgcgcggccctgaatctgcacaaagccctgctcgtcaaaacgcacaatatcgccagtgtcataccagccgcgctccatttcgccgcgaacattctcggcggtgggcacttccagtacacctggcttctccacccgcagatagccgttcattatgttcggccctttcagttgcaggcgtccgccctcttcgataccagggacgctcaacaggcgcgcatccattcctggtagaatacgccctaccgtaccgggtttcgccgccatcggtacgttgatagaaacgacaggcgcgcattcggtcacgccgtagccttcaaggatgcgcaggccaaatttatcctgccaaagctgtttggtactttcttgtaatttttctgcgcctgccaccacatagcgtagacgatagaagtcatacgggttggcgaaacgcgcgtagtgaccgaggaaagtgctggtgccgaacaacacggtgcaactgcggtcatacaccaactccggcacaatgcggtaatgcagcgggcttggataaaggaacacttctgcacctgtaagcagtggcgtaaacaggcctaccgtcagcccaaaggagtgaaacagcggtaacgcgctcataaagcgatcgttggtggtgaagtcggcaatcgttttaatctgctcgacattcgccagaatgcttttatggctatggacgacgcctttcggatggccttcagaaccggaggtaaaaaggatcagcgcctcttcttccggctgctgtttaacctgtgccagacgcggcatcagcaaatgagcgaagatccatactttgtcggcagtggtgacatctgcttttaaatcttccagatagacccagcgcacctgagtaagttgctccggcagatgccagagtttgcctttatcgagaaactggcgggaagtgaagatggttttgatttcagccgccgtaatagcactggtcagcccttttaccccggcagtgtagttcatcattgcgggcatgcggcgacgggcgatggccccaaaaatcactgccgcactgatgcctgcattgggcagcattaagccgatgcgttcgccttcaacactgtatttttcaaggatgcgtccaacaaacagcgttttcgtaagcaatttgcgataggagtctggggtaaagttgacgtcttcgacacatttcttcccggctccgaagcggtacattgcactcagtaaagattcgtacagcgtttcacgcgggcgcaccgccattcgcgcttccatcattatttgatgcagcatttcgccagcgattttgcgacggtcacgggcacgcggcgcatccggcatcgccacctgcgttggtggcaaaatatgcagagtaatttgcgggaacaagcgacgtttaaccagacctttcaggcggctgaagtgcgtaagttccgccccttcaatacgcacaggaataaccgtcgcaccagacttcgccgcgacaaaacccgcgccatcgtagattttcatcaggctgcctgtcgtggtgatgcgtccttcagggaaaatcaccactggtcggccctgttccaccagacgtaccagatgtttaatagccataggttgcgtcgggtcgagaggaacaaagtcgataaaacttttcagccaacgcatataccactgttggcttatactggtgtaaacggcaaacactggacgcacaggtaaaaacagtccaagcaaaatgccatcaataaaagagacgtgattaggcgtaattagaacgcgctcgcccttcagtgcctgggtgtcacccgtaacgcgaacgcgatacaaaacacggcacaaatttcgaaaaaagctaaaaagcattccaactccctttgctctgattcagtaaaagcgaatggagggagattacacgagataaagaacgcgagcgacagtaaattaggtgcgaaaaaaaacctgcgcatccgcgcaggttggtgcaagagacagggtacgaagagcgtaccgaataatctcaccaatcaatacctctgggatcttgattgtggtctgcacgacgactcttcgccagcgagaaaacgcaaaggaatgaagggaaatgcaacgaggtgtgtaaattgtcggttactgttacagattgatgaccggcaaaaaaaacctgcgcatctgcgcaggctggtgtaattcatgtgctcaacccgaagttgacttcacctatcaatacctctgggatcaccactttagcaacctgaagccaaacgccaccagcggtcaatcgcaacagcgtttcgcaaagtgtaaccaaaggtttgcaatctctttttttgtcttacttatttgcgtttggctcacattcccacgatgaaaacacgccaccccttgaaccaacgggcgttttccgtaacactgaaagaatgtaagcgtttacccactaaggtattttcatggcgaccataaaggatgtagcccgactggcaggcgttagtgtcgccaccgtttcccgcgtcattaataatagtcccaaagccagcgaagcttcccggctggctgtgcatagtgcaatggagtctcttagctatcacccgaacgccaacgcccgtgcgctggcgcagcagaccactgaaacggtcggtctggtcgttggtgatgtttccgatccgtttttcggtgcaatggtgaaagcggtcgaacaggtggcttatcacaccggtaattttttattgattggcaacggttaccacaacgaacaaaaagagcgtcaggccattgagcaactgatccgccatcgctgtgctgcgttggtcgtccatgccaaaatgatcccggatgctgatttagccagtttaatgaaacaaatgcccggtatggtgctgatcaaccgtatcctgcctggctttgaaaaccgttgtattgctctggacgatcgttacggtgcctggctggcaacgcgtcatttaattcagcaaggtcatacccgcattggttatctgtgctctaaccactctatttctgacgccgaagatcgtctgcaagggtattacgatgcccttgctgaaagtggtattgcggccaatgaccggctggtgacatttggcgaaccagacgaaagcggcggcgaacaggcaatgaccgagcttttgggacgaggaagaaatttcactgcggtagcctgttataacgatagtatggcggcgggtgcgatgggcgttctcaatgataatggtattgatgtaccgggtgagattagcttaattggctttgatgatgtgctggtgagtcgctatgtgcgtccgcgcctgaccaccgtgcgttacccaatcgtgacgatggcgacccaggctgccgaactggctttggcgctggcggataatcgccctctcccggaaatcactaatgtctttagtccgacgctggtacgtcgtcatagtgtgagtactccgagcctggaggcaagtcatcatgcaaccagcgactaaccgcagttaaagcaattccagcgccagtaattcttcgatggtctggcgacggcgaatcaaccgcgcctgaccattatcaaacagaacttctggtaacagcggacggctattgtagttggaactcatacttgcgccatatgcccctgtatcatgcagtaccagataatcacctgccttcacttccggcaaggcgcgggtttcaacatttcccccttcctgctgggtaaagacatcgccgctttcacataacggtccggcgacgacggtttccaccgttggcgcgtgttccagagaacgaccatcagctgccagggcactgatatggtggtaactaccgtacattgccgggcgcatcagatcgttgaacccggcatcaaccagcacaaagtggcggctccccatttgtttgacgctccgcacctgagtaattaatacgccagactgcgctaccaggaagcgacccggttcaatttccagtttcacagggtggcccaaatggcgggcgatttgctcacgcgcggcattccacagaccataataatgttcggtatcaaccgcctcttcaccctgttgataaggaacagaaagcccaccgcccgcagaaatagcctgtaaatcctgaccgaattcgatgacctgacgcaccatagcaccacacacctgttccagatgggcataatcaacgccagaaccaatgtgcatgtgaatgccgaccagctgcagatgatgacgttgtatcacgtccagtgcggcgggcagatcggtgtaccagataccgtgcttgctgttttcgccaccggtattggttttttggctatgtccgtgaccaaaccccggattaacgcgcagccatacccgatgccctgggctaacctggcccagttggtcgagcatatcaacagaacccgcattcaccggaatttgcaattcactgacgcgttcaagcgtcgcctgatcgataacatctgccgtaaaaacaatatcatcggggtgcgtttgcggattgtaacccgccgccaacgcacgctctatttcgcctaagctgacggaatccactttcacgccctgctcacgcattaagcgcaaaatatgaatattggaacaggctttctgtgcaaagcgcaccacatcaaactgtttcagcgctgcaatctgccgacgaataatttgcgcatcgtagacccacaccgggcagccaaattcagcgggcaaacgcagcagattttcggcggtgagatcggtatcggtgctgaacagactatgtggcataacaaactccagataagtgcttttttatgattacgccacatcataaaaagaataaaaaatatcgatttatgtcgagtctatgcaaaaatgatatggattaccggattgcgagagagcgctaatggccgccgttaacttacgtcatattgaaatttttcatgcggtaatgaccgccggaagcctgactgaggcggcacacctgctacacaccagtcagccaaccgtcagccgcgaacttgcgcgctttgagaaggtgatcgggctgaaattgtttgagcgcgtacgtgggcgattacatcctaccgtgcaaggactgcgtctgtttgaagaagtgcaacgatcctggtacggactggatcgcattgtcagcgccgcagaaagtctgcgcgagtttcgccagggagaactgtctattgcctgcctgccggtctttagccaatcttttttaccgcagctcctgcaaccctttctggcacgttatcccgatgtcagcttaaatatcgtgccccaggaaagtccgctacttgaagagtggctcagcgcccagcgtcatgatttaggactcactgaaacgctccatacgcctgcgggaacagaacgtaccgaattactctctttagatgaagtgtgtgtgttacctccgggtcatccgctggcggtaaaaaaggtattaacgccggatgattttcagggtgagaactacatcagcctttcccgtactgacagctatcgccagttgctggatcagctatttactgaacatcaggttaaacgacgcatgatcgtagaaacccacagcgccgcgagtgtctgcgcaatggtacgggcgggggtaggtattagcgtggttaacccgctcaccgcactagattatgcggcaagcggtttagtggtgcggcggttcagtattgcggttccgttcaccgtcagcctgatccgccccctgcaccgcccgagtagtgcgctggttcaggcgtttagtgggcatttacaagcggggttaccgaaactggtcacttctcttgacgctattttgagcagtgctacgacagcataattagctcagcataaaagcgacagcatcctcggcatggatcgccgcggtatcaaacacaggcaaaacactgcgctcttctggcaccagtaaaccaatttctgtgcagccaaaaatgacgccctgtgcgccctgttctgcaaggcgagcaatcacttgcgcacaataagcgcgactcgcttcggtaaattgccccagacacagttcttcaaaaataatctgattaattttcgcccgttcatccgcttcaggaataagacaattgatggaaaattgttccgtcagccgcccgcgataaaaatcctgttccatggtgtaacgcgtacccagcagcgccacacgagtcattccggccccggtaattgcacgtccggtggcatccgcaatgtgtaagaaaggcagagtgcaacgactctcaatggcatccgccactttatgcatcgtattggtacatagcacaataccttctgcgcccgcccgctgtaagccaagcgccgcctcagccagaatgtccccggttttatcccattccccgcgacgctggcactcttctatttcatgaaaatcgacgctatgtagcagcacttgcgcagagtgaagcccaccaagccgctgtttaatgccttcatttatcaaacgatagtaaggaatggtggattcccagctcattcctcccagcaaaccaattgttttcattcctctctcctgatgtgtgttaccgcaacaaggctgaataaggaacgagacaaacgcctcaacggccaagtgcccaatctctattaacgaaaaaagggccggatgtacagcacatccggcccgtgaaatcagacgccgatatttctcaacttctcgcctgccatcagtttgcgttcgatatgttccagcgtgacatttttggtttccggaatgagccagaaagtaatgcccacaaacgcaatgttcagcgcagtgtagagccagaacgtaccggcagcgccaatgctatcaagcagtgtcaggaaggtcgcgccgataatcatattgctcacccagttcgtggtggtgctacaggtaataccgaaatcgcggcatttcagcggctgaatttcagagcacaggatccacaccactggcgcggcgctcatcgcataaccggcaatacacatcatcgtcatgccaacagagagccaggacaagccactggaagccgtaccgttatcaaactgcatcaggcaatagcccagcaccagagtgcctaacgccatcacgctgaaaccaattttcagagccggtttacgccctgctttatctaccgtaaacaccgcaataaaggtggcgaacataaaggtcagccctacgaccagagtcgcaatcatctgttgttctgtggtcgtaaagcccgccattttgaagatacgcggcgcgtagtacatgatgatgttcataccggtaaactgctgcatcgcctgcaacaacataccgagaaacacagcacgacggacgttacggttgatcttaaacagtgcccaaccgccctgttttaacttcaggctttcacgaatttcgttgagttcttctcgcgctttttcgctcgtatcgcgcagcatacgcaatacttcttccgcctcaatatgacgccccttttccgccagccagcgcgggctatttggcaggaagactaccagaataatcagcagaactgctggtaaagcaagaacccccaacattgcgcgccagttaccgctataactgaacgctgtatcggataaaaacgccagcacgatgccgagtgtgaccatcaactggtacatactgatcatcttaccgcgaacgttttcacttgccatttcagaaagatacagaggagcggtgtaagacgcgatcccgacagcaatgcccagcaccacacgagcggcgattaacatctctacgctggtcgcaaaagcggaccctatagaaccgagtacaaacaggatggcccccgccatcaggctgtatttacgccccaggcggaagctcagccaaccattaaacagcgcaccaattgctgcaccgagcatcatgctactaaccacccattcctgcaaacgactggtcagcacaaagtgatcggtaatgaacggcaacgctccggcgattacgccgatatcaagaccaaataacaatcctgcgaccgcagcagctacgctaacaaacatattcatacgccgcgtatcccgcaaagaacgtggcgttaaagcagattccgtattgatagtaaccattttttcctgccagcagagagtaagacatagtgaaaaaatacgtgaacaactcacgcaggtgtcaggtcggaaacagcataaatatggattaaattgctgcgacatgtcgttatgtgatggatattccaattttcaaattaagttgaattattgagattattattaaccacctaattttacagcagataaaattcataaagttcattaattgataattaatatggattatttcataaccatgatatggattatgatgatctacaggtataaaaaaccctgccatgcggcagggtcataaaagtaagaagaatgaattaacgcgccagccaaccgccatccacggcaatggtataaccattcacataatcactagcgctggaggcaaggaacactatcggccccatcaggtcactcggcagtccccaacgaccagctggaatgcggtcgagaatttccgcgctacgttgttcatctgcccgtagttgttgagtattgttggtcgccatgtaacccggggctatcgcattaacattaatgttgtgtttagcccattcgttcgccatcaatcgcgtcacacccatcacgccgcttttacttgcggtataagaaggcacacggatcccgccctggaaggagagcatactcgcgatattgataatcttgccgccattgccttgcgcgataaagtgtttcgccgctgcctgagacatgaagaatacgctcttgatattcaggttcatgacatcgtcccagtccttttcgctgaactcgagagcatcttcgcggcgaatcaatccggcgttattcaccaggatatcaatatgaccaaactccgctaccgcgcgatccagcagtgctggaataccatcaatctttcgcagatcggcggtcaggcttaaaaaacgacgccccagcgctgtgacctgctcgatggtttcagtcggttcaacgatgttaatgccaacaatgtcacagcccgcttgcgccagccccaacgccatcccctgacccagtccagtatcacaaccagtgacgaccgcaactttaccttcgagagaaaatgcacttaaaatcataacaataccttattcgtttatgcccacaattagcgcaaatctttaacggccacatggtccatatcatcaaagacctggttttcaccgaccatgccccagataaaggtataagctttggttccgacaccggaatggatgctccagctcggggagatcaccgcctgctcgttatgcatcacaatatgacgcgtttcttgcggctgccccatcatgtggaaaacgcaggcgtcatcatccatattgaaatagaaataaacttccatccggcgctcgtgggtgtgacacggcatggtgttccacaagttacccggagccagctccgtcagccccatactcaattggcaggtttccagtacatccgggacaaaatatttgttaatcgtgcgacggttactggtgaggttatcgcctaacgtgactggagatacttcgtccggtgtgacttttttggtgggatacgtcgtatgcgcgggtgcgcaattgtaataaaacttcgccggagtgccggtatcaatactggcaaagacaacttcttttgcacctttaccaacatacagggcgtcgcggtgaccgatttcatagcattggccatcgacagtaatcgtaccggcaccgccaatattgataacacctaactcgcgacgttcaaggaaatagcttacgccgagttgtttaccaacttccccgccaacggaaaccgttttagttatcggcataatgccgccaacaataattcggtcaatgtggctgtaaaccatggtgtactcatcggcgacaaataccttttcaaccaaaaattcattgcgcagcccttgggtatccagcgtttttgcgtgcgcactgtggatgctctgtcttacgtccacatcaacctccgataatcagtgaagcgtgaaaatagaaaacgatagtgaaacactgtttcgttttctctataaagggatgatatgcccatgggctagggttttcaattaaaaataaaacaatgtttcatttttaagttaaggattaaaaaaagtgcagtgtcgatcacgaatatgtcatgagaatggaaaaatgagggagcccagaaaatgtatgtcgacttgccagccatcattattcaacagattaatgacggcagatatttatcggtaaggaggaaatgcagagttattcgtcacgttcaatggtcaatgccacaccctggcccccgccgatacaaagcgttgccagtcctttgcgggcattacgtttcaccatttcatgaaccagagaaaccaggattcggcaaccggaagcgcctatcgggtgaccgagtgcgatcgcgccaccattgacattgacccgacgctcatcccactcaagcatcttgccaacgctaagcgcctgtgcagcaaacgcttcattagcctcgataagatcgacttcagccaactgccagcctacacgctccaggcaacggcgggtcgcatacaccggcgcaattcccatcaatgccggatctacaccaacgctggcaaatgcgcgaatgcgggccagcacgggtaaattcaacgctcgtgctttggcttcgctcatcatcattaccgcagctgcgccatcgtttatggaacttgcattacccgctgtcacagaaccgagactatcaaaactaggatttaaacgggctaagccttctgcgctggcgtcagtgcgtggctgttcatcggtatcaacaaccaacgtctgcccgttactttgggtcattaccgggacgatctcatctttaaatcgtccggcgtcaatcgccgctcgcgctttttgttggctgctaagtgcgtaagcatcctgcaactgacggctgatgccatattcgcgagccagattttcggcggtgacaccaatatgataatcattgaaggcatcccacaacccatcatgcacaagactgtcaaccaactggctattgccaagctgtgcaccggtgcggctatcagtcagaacatgtggtgcgcggctcatgttttcctggccaccggcgatgacaatatcagcctcgccacactgtatcgcctgagtagccagatgcagtgctttaagcccggaaccgcaaacgtcattaatagtgattgcagaaacgctattaggcagaccacctttaatagcgctttgccttgccggattctgccctgcccctgcagtcaacacctgaccaagaattacttcatccaccgcatatgcaggaacgccggtacgttctattaacgctttcacgaccagactaccaagttccacggcggaatgacccgctaacgcaccacgaaagcagccgataggtgtccgtaacgccccgacaatcacaacgtctttcatcacaacctcgcaccaattaacagtgcaatagtaaatgattgttaattacagttatcttaattgtttaaaaaaagtgatttttatcacaaaggaaatatgcctgagcagcagtcagagacataactggcacgtaaggtttgcaaccactaacccaccaatagaggggtagatagggcgttaatctcccatacttaacctggtttatggtaaattgccctccattttgtttaatttgtagatgatacgttcagataatgtctaatatttggtctaaagaagaaactctgtggagtttcgcgctctacggcacagccgttggtgcaggcacgctcttccttcctattcagttaggtagcgcaggggctgtggtcctgtttattactgctctggtcgcctggcctttaacatattggccacataaagccttgtgccagttcatcctcagtagtaaaacaagtgcaggtgaagggataacgggcgcggtaacacactactatggcaagaagattggtaatctgattaccacgctgtacttcatcgccttttttgtcgtcgtgttgatatatgcagtggcaattaccaacagtcttacggaacagctggcaaagcatatggttattgatcttcgcatccgtatgttggtgagtctgggtgttgtattaattctgaatctcatttttctgatgggacgtcatgccactattcgggtaatgggatttttggtattcccattgattgcctatttcttatttctttccatttaccttgtcggtagttggcaacctgatctattaacaacccaggtagagttcaatcagaatacccttcaccagatatggataagcattcccgtgatggttttcgcctttagccatacgcccattatttctacgtttgccatagacagacgtgaaaaatatggcgaacacgctatggataaatgcaaaaaaattatgaaagtcgcttatctcatcatctgcataagtgtactgttctttgtctttagctgcctgctttctattccacctagctatattgaagctgctaaagaagaaggggtcaccattttaagcgcgctttctatgctgccgaacgccccagcatggttgagtatttccgggattattgtcgcagtagttgcgatgagcaaaagtttcctgggtacgtactttggcgttattgaaggtgccacagaggtcgtcaaaacaacactacagcaggttggtgtaaagaaaagtcgtgcatttaaccgcgcactaagtattatgttggtaagcctgattaccttcattgtttgttgcattaacccgaacgcgattagcatgatttacgcgatcagcggcccgctcattgccatgatacttttcatcatgcctacgctgagtacgtatctcatcccggcgcttaaaccctggcgttccatcggaaatctgattacgctgatcgtgggtatcctgtgcgtaagcgtaatgttctttagctaatatcagttgtggatggttcaaaattgctacaattttgaaccattccatttttcataatattcatttgttattattccaccctatcacttctctcgtcatatcctagtattatcagttagttaaacacacaaagagatctgaacatcttaaataagactatttaagatgcataacttagattcgcaagatatcttctggtcattcaaaaacaatttgcgatatagatattcttataccatgagatagttatctggaccgctctcaaccatgcaagattaaatcagtgaaacataatcatatttgataacgagaaatgcatttttaaatgccttactcagaattatagcaaatacagattaatcgcaatttttcccggcaaaattacaaaatcatggtgtattgacatcatcaataaccaatgaaattatgcaattatatacggatagggaggttcttaacatggggctttgtagtcgttataaaagtcttacatgcaatagttgcagtatgcattgccaaataatgccagaagagagtccgcgtttgcagtattgcgcaaacagctgtttttgtatgtggcccgaagaaagtagttattttaatcgtggtgtggtagaaggtatcttaacaaaaaaccacaatgcgagattaagcggatatatttttgtcgattttagtgtaagttttttacgtctattccttgaaaaagactggattgactatcttgcaagtactgacatggggattgttttagtcagcgaccgcaatatgcaaagcttagctaattactggcgaaaacacaacagtgcaatatctgctgtcatatataatgatgatggtcttgatgttgccaatgaaaagatcagacaactatttattggtcgttatttaagttttaccggaggtaacacattaactcagatggaattcaccataatggggtatatggtttctggttataatccatatcagattgctgaagttctggatatggatatccgtagcatctacgcgtacaagcaacgaatcgaaaagagaatgggtggtaaaataaacgaattatttattcgtagtcatagcgtccaacattgatactcaacgaccagccagaatcatactctgtttatacgggcatttattgaaatgtccgtattttataaataggccgtcccctcaagagtaaacaccatagtatttaaaaccatcacacgaaaaattcagaagcattacgaaatatgaatttacaaacaatagtggcataaatgttaaccatgttaatttacgtaaagttttacgttgcaacattaaagcctcatttcaatcatcatgataaatataaaattaatatatatttatgccgtaaataccaatatacttagcaaactatgtgatctccatttcgattgatttagtgtttattgacgtatgtactggattattaacgataatatcgagttctggcctgagcaccgaaaattaataagcgtacataacgccgatcttaacgtcgttctgacaacgccagccagtcgatgtttaagtcttctacttgaagcttttcctgatgtggttgcacaacaagattttttcaccagagtctgggaagaagaaggtatgcgtgtgcctactaacacgttatatcagaacatatccattatcagacgcggatttcgcgctgttggtgatactacccacagcctaattgcaaccgtgccgagaagaggattcaagatccataatgacattaacatacaaaatcatgtaataaacagcagtacagacgcacatacacacaatgccccacctgccataaaagttaatgcgggatacaaagagagcattggtggcgcaaagaatttcaataacaaaatcctcaaacatataaaaagtcatctaattatgttgagcgcatttgtcataggcgcatattctgcatattggctatggaataataatcaaccgaagccatttttcaaggattacaagactgttgcggaaattaatggctgccattttaatgtaacagaagatacaattgatgggttgaaagagttcgataaatataaaacacggatactggatagcgggattaactgtaaaaaacatccgtggttatacttccctcttgcaaaatccagtccggggatgattgttatggcatgcaataaaaactataaccaacatgaagtggcaaactgtttaaccctgtcttaccgtgaggttaatcgtgattgattataaaaaaaacttattatttattttagtttttatcagtgggtttattctcttcactgtctattcttacactgcagaaaaaatgatatataacgaaacatgcactgcaaattgggtaatttttaatgaccagggacgagcaaatcttaccatcgactttatgtataacaaaaaaaataaaacaggaactgttgcgttgagtggaacctggcaacaaggtaacagagaaagtaaaagtatacggcgaaatattgaatacacatggattgaaaactatgacacagcccatttaacaagtaagaaagttaataagtttgagattatggatcaagttgatgatgatagacttgcacaacttattcctgatttttatgtctttccagaaaaaagtgtaagctataatatactaaagcaaggtaagcatgcttttattttgagcattggtaacagagcaataatgcattgtgcaaggtaaactaaaatagataacaaaaagatggaacctcgttaatcataaaacaataaaattaaatattctcgcagtatatggcagtctaaagcatcaaagatttgatcaacatctttcattttagacatctccttgcaatgtaaaatatcatgtatcaacaacatctggtgcaaatccaactgtcgaactcgacattcatcttagctcgattattattccttcgtacagtgcttgtaaacaatacagaaagaggattattaagaaccagtttactcagactatcaatagaggaaaggactaacgtttctttaaaagaattgatttcatcatctgttaaactaaactcatcattgacagatcgactgatataactgtttttaactttactctttacgttgactttattgacagaattaacattcacatatctactatttaatgtccaacttgttgtttgcgtgagaacattctcagcattaaggaatttttttaacggaatccttggtttctttttgctgtcgctatttacaatatcatgcatatagaccatttcatgaatctggctaaattcaatgtccattgtatacctcacatttttaccgtgactcgatgttactgttcaataatcaccttccatcaatactaaaattaatacccctaatgtgccgataacaaatatagtcattctacgtaacgtctccataaggtgatatttgacattatcagaagctgcgaattcggattttgctctaatcaaatgagagaaatgtaaaatgaagccacgaaatattaataatagcctaccactgcaaccattagttcctgatcaggagaacaaaaataagaaaaatgaagagaaatccgttaatccagttaaaatcacaatggggtctggtttaaattatattgaacaagaatctcttggaggaaaatatctaacacatgatttgagtataaagatagcggatatttctgaagagataattcagcaagcaatattatctgctatgagcatatataaatttagcataacagatgatttaatgagtatggctgtaaatgaactcataaaactgaccaaaatagagaataatgtagacctgaataaattcactactatatgcacagacgttctatccccccgcgtcaccagacataataaagaaaaaaacaaacgacattctacccttctcaaaaatcccctttttaattttcattgaaaaaatggcaattgatactatgaatccaggtcatacacattaaggcatttatgtaatgtcgtaattaagataactaataaggtgaatattagtaaaacaactaatgatgttattagtttgtagtgaacagtacttttaccaataatgaaaaatataccataagcaatgcaagcttaaaactcataatttaaaaaagataaatataaaaatatcaatgagtcaatcaataataatttggcatcacgagacacatcacagaggaatattatgagcacagaaacaattgaaatattcaataatagtgatgaatgggcaaatcaactaaaacacgcattaagcaaaggagaaaatctggcattactacatggtttaactcctgatatccttgatagaatatatgcatatgcattcgactaccatgaaaagggtaatataacggacgcagaaatttattataaattcttgtgcatttatgcgttcgaaaatcatgagtatctaaaagattttgcaagtgtatgtcagcccaaaaagaaatatcaacaagcatatgacctttacaaactaagttacaattacttcccgtatgatgactatagtgttatttatcgtatgggtcaatgtcagattggggctaaaaatatcgataacgcaatgcaatgtttctatcacattattaacaattgtgaggatgatagtgttaagagtaaagcgcaggcatatattgaactcttaaacgataatagtgaagataatggctaagcattacaatcatttggttaaatttgctggttatagtgcagttaaccactataaccagcacctcttatgttttcttaaatcagcatcttaaaacagttaagagcatactataaatcattatttttcaatgcgttagagaacaatctactttatcaaaattgaataaggctatttcagattacatcactgaattcctaagataaattagtgaacacaaccatagatatgtcaaatgtaatttcctgtagcgttaatgacacataaatatgaatagccataatttctattgcttaagcaggatgcaagaaaccaattttttcatagaggttaactaatggacttagaaaataaattcagttatcattttcttgagggattaacgctcacggaagatggaattcttactcaaggaaatgagcaagtttatattccacagaaagagttaggtgtattaatagtattacttgaatccgctggtcatgttgtactgaaagatatgatcatcgaaagtgtatggaaaaatattattgttagtgacgagtccctgacaagatgtatctattctttgcgctgcatttttgaaaaaattggctatgatcgttgcatagaaacaatctaccggaaaggttatcgtttcagcgggcaggttttcaaaactaaaattaatgaagataatactagtgactattccatagctatattccctttcactactagtttgaatacactggatccattaatacttaatcaggaattagtgcaaatcattagtaataaaaaaatcgatggtctctatacctatccgatggctgcgacaaatttttgtaatgatcacatatctcaaaatagtttcttgagcagattcaagccagattatttcgttacaggaagaataaaccagaataatgcagtgaacactttatacattgagttgatcgacgctaaaaaccttttcctcatcgccagtaatcatctccctgttgatgaactacataatacaagtcaatttattatagataatatccttcaaacggtacataaaccagaacgatctgtaagattagctaagcaggaccaaggatataagaatcattatttaagtgatgaaatgttagccggaaagaaagaactttacgacttcacccctgaaagcatttacagggccatgactatatttgatagattacaaaataaaagtgatatacagacgctaaaaacagaatgttattgccttctagcggaatgccatatgtctttggcacttcatggaaaaagtgaacttgaacttgctgctcaaaaagcattagagcttttagattatgtaagtgacataaccactgtcgatggaaaaattttagctattatgggactgataactggtctgtctggacaagcaaaagtatctcatatcttatttgaacaggctaagatacacagtactgatatagcctctctctactactatagggcactagtccactttcataatgaaaaaattgaagaggcaaggatttgtatagacaaaagtctacaactcgaacccagaagacgaaaagcagttgtgataaaagaatgtgtagatatgtatgtgcctaacccgctcaaaaacaacattaaactctactataaagaaactgagagtgaaagccatcgagttataattgacaacattttgaaattaaagcagctgacgagaatttgtatgcgataaatttttattgacgcaattttattatttagatgtatgcaacttgttatttaaacaacagagataaaaatatctaagatattcaccttattgcaagatatttaaaatgctctagagttaaaagtatgatgtaaagaccattggcctggacaattaaaaaagggagctttatgactaatccaatcggtatcaataatttatctcaaagtagtaatatagcgaatgcaacgggtgatgaagtcgtaagtttagataaacacatcaacaccagtgctactgatacagatcaaatacaagcatttatagttagtacatggatggcgccttttcaaaatgatatgtatagtgaagataatcctatcagtccttactataaaattgagtggtaaacgattgaccaaataaatcataacgagatacttttataatagtatctcgttcctttcattcaatcctcacacatgaaaaaatatgcgctcaccaaaagttaaattcttaaccatcttcacgttttgtatatttattacaaaaatgtctttcgccagcaactcttgctctaatgaagcaggaacaatgttcagaatcgaaccaaatttaattaaagctatcgctcttgttgaaagcaatctaaaaaaggatagcataggcaagaacagagataagaataacaatataaagagtttagattattggttaatgcagataaaccagatgcatattcccctgttaaaaaaacgtggaataataaaagatgaacgagatttgttagataacccttgtctgaacattaaaataggaaccgagattttatataaccattttagtcgttgtggagtaacgtggcaatgcctggggacttataatgcgggttttgcaatggataaccaaaaaaagagacagcaatatgccccaaaatatatattgtatataccaggcttaatgaactaaacaatcgtaaggcttcagcaaaatgagcctaaagcctcttttttttatatagtgcaaacacccatacgtaaagctgttttgatcaactcgataccactgtgaacatctaatttcttcatgatattgagtctatgagtttcgactgttttcctgcttaactgcaagaaattagcgatttctttgtttgttttaccatcagctatgagttgtaatatttcactctcacgatttgtaagttgattatcagaggaatacctggaagatattttttcacaatccatatgtacactatcaaaataagtgtaaccattactaatgctatcaatagcacgatttagtttcgccgggtgactggttttccatacgcatcctttcgcacctgcttcaagcaattttatactatcaatatacggcatctttgctacaaatgtaataatatgagcatctatcttatggcttttaacccattttacgagttcggcccccatcattccacctgcaaattctcctaaaataaatatttaggctgtagatttgttacactccgctatagctttcttcagatctttatagcccacttatttaacaacttgaaaataaggtgttttacctgggttgttacaaaaggattgcattgcgtaaacgctttttatttacaacaaaatggggaagtattacggcgaagataaattggagcgggcgaagggaatcgaaccctcgtatagagcttgggaagctctcgttctaccattgaactacgcccgcttcgagatgcgtaaggcattataaaccttacgctctccttagcaagtgccacgctgctgactgctgattaattcgccatcagcattttggcttgctgccctgaggcggcaagtaacgtagcggatcaattgccgttgcacggtaacgaatctggaaatgcaggcgaacagatgccgcatccgtgctccccatagtggcgattttttgcccagccttcacgctttgcccattatttaccagcatcgtgtcattatgggcgtaagccgtaatgtaatcttcactgtgtttaatcatgatgagattaccgtagccacgcagctggttgcccacatacaccacctttcctgcacccgcggcgtaaataggtgtaccccgtggagcactgatatcaatccctttattgccgccatctgctgtgctatacggcatgataactttccctgtcgttggccataaccaacaacgttgccctactggcggccaggaacttttcggtaccgcactactcggtgtaacgcttgcggttttggtcgtacttttggcggtacttttacgtgtaatactgctacttttcgccccacccagttttagtttctgaccaacttcaatggtgtaagggggggaaatgccgttcagtcgcgccagttcttttacgctggttcccgtggtgcggctaatacgatatagcgtatccccccgtttcacggtgtaaacggagccggaatacgttcctgtatcggaacttttgctaccgctacagcccgccaaaagcagtccaacgcttaacaacatcacgatacccagagattttttattcaggcgtcccgcactcaaaatctttcctcgcttaaaaaacaagacgccttatcatagcagccagcctcttgatacccaatctcttgcttctggaaaaacgtggtaatagagaaagaggttaatttcatttggcaaagggaagtatcatcagcaaaatattcgctgtagaggtatcgaacttcctgactttttaccctatttcccatcctgatgcgtaataatcccaatttatcacattgattttatcgccactcatattgatacgtatcactgcccctattcagagtcctgtttcgtatcatatctgtgtttttttaacgtcatcacacttcctacctcccctaacgcttatcgtcgtttctggcgtaaatcttgcctgcttagactaaatctttgccataagaaccaaatgttcaaatcgaggggatttctatggaagcgcgggaagcaaccgctacgggtgaatcatgcatgcgcgtcgatgccattgctaaggtcaccgggcgggcacgatatactgacgattatgttatggcgggcatgtgttatgcgaaatatgtacgtagccctatcgcacatggttatgccgtaagtattaatgatgaacaagccagaagtttgccgggcgtactggcgatttttacctgggaagatgtgcctgatattccattcgctacagctgggcatgcctggacacttgacgaaaacaagcgcgataccgccgatcgcgcactgctaactcgccatgttcgtcatcatggtgacgccgttgccatcgtcgtggcccgcgatgaactcacggcagaaaaagcggcgcaattggtcagcattgagtggcaagaattacccgttatcaccacgccagaagcggcgctggcagaagacgctgcaccaatccataacggtggcaatttactgaaacaaagcacgatgagcacgggtaatgtccaacaaacaatcgatgccgccgactaccaggtacaggggcactatcagacccccgttattcaacattgtcacatggaaagcgtaacaagcctggcgtggatggaggatgacagccgaattaccatcgtttccagcacccagatcccgcacattgttcgccgcgtggttggtcaggcgctggatattccctggagttgcgtacgagtcatcaaaccatttgtcggtggcggttttggtaataaacaggatgtactggaagagccaatggcggcattcctgaccagcaagcttggcggcattccggtgaaagtttcccttagccgtgaagagtgtttcctcgcaacccgtacccgccacgcttttaccattgacgggcaaatgggcgtgaaccgcgacggaacattgaaaggttatagtctggatgttctgtctaacaccggcgcttatgcatctcacgggcactccatcgcttctgcgggggggaataaagtcgcttacctttatcctcgttgtgcctacgcttacagtagtaagacctgctataccaacctccccagcgctggtgcgatgcgtggttatggcgcgccacaagtcgtatttgccgttgagtctatgcttgatgacgccgcgacagcgttaggtattgatcctgttgaaattcgtttacgcaacgccgcccgcgaaggagatgctaatccgctcacgggcaaacgtatttacagcgcagggttgccggagtgtcttgaaaaaggccggaaaatctttgaatgggaaaaacgccgtgcagaatgccagaaccagcaaggcaatttgcgccgcggcgttggcgtcgcctgttttagctacacctctaacacctggcctgtcggcgtagaaatagcaggcgcgcgccttctgatgaatcaggatggaaccatcaacgtgcaaagcggcgcgacggaaatcggtcagggtgccgacaccgtcttcagccaaatggtggcagaaaccgtgggggttccggtcagcgacgttcgcgttattagtactcaagataccgacgttacgccgttcgatcccggcgcatttgccagtcgccagagctatgttgccgcgcctgcgctgcgcagtgcggcactattattaaaagagaaaatcatcgctcacgccgcagtcatgctacatcagagtgcgatgaatctgaccctgataaaaggccatatcgtgctggttgaacgaccggaagagccgttaatgagcttaaaagatttggcgatggacgctttctaccaccctgaacgcggcgggcagctctctgctgaaagctccatcaaaaccaccactaacccaccggcgtttggctgtacctttgttgatctgacggtcgatattgcgctgtgcaaagtcaccatcaaccgcatcctcaacgttcatgatagtgggcatattcttaatccactgctggcagaaggtcaggtacacggcggaatgggaatgggcattggctgggcgctatttgaagagatgatcatcgatgctaaaagcggcgtggtccgtaaccccaatctgctggattacaaaatgccgaccatgccggatctgccacaactggaaagcgcgttcgtcgaaatcaatgagccgcaatccgcatacggacataagagtctgggtgagccaccaataattcctgttgccgctgctattcgtaacgcggtgaagatggctaccggtgttgcaatcaatacactgccgctgacgccaaaacggttatatgaagagttccatctggcaggattgatttgaggataacatcatgtttgattttgcttcttaccatcgcgcagcaacccttgccgatgccatcaacctgctggctgacaacccgcaggccaaactgctcgccggtggcactgacgtactgattcagctccaccatcacaatgaccgttatcgccatattgttgatattcataatctggcggagctgcggggaattacgctggcggaagatggcagcctacgtatcggctctgcaacgacatttacccagctaatagaagatcctataactcaacgtcatctcccggcgttatgtgctgcggccacgtccattgctggaccgcagatccgtaacgtcgctacctacggtggaaatatttgcaacggtgccaccagcgcagattctgccacgccaacgctaatttatgacgcgaaactggagatccactccccgcgcggtgttcgtttcgtcccgattaatggctttcacaccgggccgggcaaagtgtctcttgagcatgacgaaatcctcgtcgcctttcattttccgccacagccgaaagaacacgcgggcagcgcgcattttaaatatgccatgcgcgacgcaatggatattagtacgattggctgcgccgcacattgccgactggataacggcaatttcagcgaattacgcctggcatttggtgttgccgcgccaacgccgattcgctgccaacatgccgaacagactgcacaaaatgcgccattaaacctgcaaacgctggaagctatcagcgaatctgtcctgcaagatgtcgccccgcgttctagttggcgggccagtaaagagtttcgtctgcatctcatccagacgatgaccaaaaaagtgattagcgaagccgtcgccgcggcggggggaaaattgcaatgaatcacagcgaaacaattaccatcgaatgcaccattaacgggatgccttttcagcttcacgccgcaccaggcacgccgctcagcgaattactccgcgaacaaggactgctaagtgtcaaacaagggtgctgcgtgggtgaatgtggtgcctgtacggtgttggtcgacggcacagcaatagacagttgcttataccttgccgcctgggctgaaggaaaagagatccgcacgctggaaggtgaagcgaaaggcggaaaactttctcatgttcagcaggcttatgcgaaatccggcgcagtgcagtgcgggttttgtacgcctggcctgattatggctaccacggcaatgctggcgaaaccacgcgagaagccattaaccattacggaaattcgtcgcggactggcgggaaatctttgtcgctgcacggggtatcagatgattgtaaatacagttctggattgcgagaaaacgaagtaaaaggatatccggcctgaattcaggccggattcactgaggttatgtgtttaacaactcatatttcttaatcttgcgatagagcgtagcaatgccgatgcccagttcatcagcaacttgcttcttgctgttatgacgactaagcgcctcgcggatcatttgcttttccatctcctccagcgccgtgccgcccgcatcatcgagactcaggtgcgcctcactgacctctgttacatcactttgctccgttgtgccattattcagcagatttggcggcaatagcgtgctgtcgataacttcaccactaggaaccacgttaaccagatattccatcaaattgcttaactcgcgcaggtttccgggccaacgatgcttacgcaatatttcgacgacatcgggagcaatgccaggataaacgcttcccagacgacgggtatgcagatgtaaaaagtaatgcaccaatagttcaatatcttcctgacgttcacgcagcggtggcagagttatcgggataacattaagtcggtagaagagatcttcgcggaatttaccttcggcaatgaactgggccaaattctgattagttgcagaaatgatgcgaatgtcgacttgtattgggctactggcaccaatcggcagaatttcacgtgcctcaatagcgcgcagtaatttagcctgcaacattaatggcatatcacctatttcatcgagaaacagcgtgcccgtattcgccgcctgaatcaaccctgttttaccgttggcagaagcgccagtaaatgcacctttaacataaccgaacagttcgctctccagaagctgctccggaatcgcggcacagttgatagcaataaagggtttattccgtcttccgctcaacttatggattgcacgggcgacgacttctttacccgtgccgctttcaccaaccaccataacgctggatgggctgggtgcaatacggctaatgagtcgttttaattgccgcataacacggcactcgccaaccaattgttcaatatgcggttcatcaggtgcatttgctacagaaaaactggtatggctttggtgaaacgccattaaaaataattgtcggccctgaatgttatgcaattgaccaatgattaattcacttttatcgtcccaactaacaatatgctgcatatgtccatgggtaaaattactctcaaatgttaatggtctgaaacggataggtttcccaataatattattttgcacaacaccaagtgtttttaaggcagtctgattaacaaactgaacccgattttcatcatctacaactaatacgccctgatccatattatcgatcatggtcgcaaatattttactgatgttatctcctggcccctgatcctccagaagtttgctaacaaaaatggtggatatatggcgaacataatcagaaaattcgcgtaaattatcactgatatgctcttgttgctcgtgggtaacggcaatcaaacttatcaccccaacacaacgatcctgtaaaatgacaggcgtacccagaaatgctttttcgcggcaattttctttactatcgcaaccttcgcaaaggggatcgaagcgagactgtgtcacaactttttcagttttcgtttccaggacgtggcggagcaggcgactgttgccgctcaactggcgaccaagaaacttcccatacgcgcccgttccggcaacgcgacacaagttttcatcaacgatctcaacctcaagctgcaaaaacgctggcaagcattctggcaaaacgctgaattgtcggttgaatttgcatcaatacactctgcgtagtagcaagctccatagctttaccttccagacttacttaaaagtcgatcattgaagacgttgatggttcacagatcatgatgatattaactcaggcgaaattggctttgataaaaacataagatttttatcattttctaatgaaattatggaagagatatcacatttctatatcaatatgagaattacggcggtgagtttatcaaactgaagagagatagcctgcccctttatcttatttctgatacttagcagcaaataaataacgcgataaaaaaagccaaacgttttcgtattttacaaacaaccagaagctggcatcaatttgtgatcaaccccacacattatccgtcaaattagtcttttgcagccgcgcggataattctggcacacttattgttagtcccaggtatagctgtgaaaacaccaatcactttggcaagtcacagtgaaataaaccactttgcctgtcattccactaccgggactttatgatgaaaactgttaatgagctgattaaggatatcaatagcctgacctctcaccttcacgagaaagattttttgttaacgtgggaacagacgccagatgaactgaaacaagtactggacgttgccgcagcattaaaagcactgcgtgctgaaaacatcagtaccaaagtctttaatagtggattaggtatttccgtattccgcgacaactccacccgtacccgcttctcttatgcttccgcgcttaacctgctcggccttgcacaacaagatctcgacgaaggcaaaagtcaaatcgctcacggcgaaaccgtgcgtgaaaccgccaatatgatctccttctgcgccgacgctattggtattcgcgacgatatgtatctgggcgcaggcaacgcctatatgcgtgaagttggcgctgcacttgatgacggttacaagcagggtgtactgccacagcgtccggctttagtgaacctgcaatgcgatattgaccacccgactcagagtatggctgacctcgcgtggttacgtgaacactttggtagtctggaaaacctgaaaggtaaaaaaatcgccatgacctgggcctactctccaagctatggcaaaccgctctctgtaccacaaggcatcatcggtctgatgactcgcttcggtatggatgtcaccctggcccatccggaaggctacgacctgatcccggatgtggttgaagtggcgaaaaacaatgctaaagcctccggtggtagcttccgtcaggtcaccagcatggaagaagccttcaaagacgcagacatcgtttatccgaagagttgggcaccttacaaagtgatggaagagcgtactgaattgctgcgtgcgaacgatcacgaaggcttaaaagcactggaaaaacagtgtctggcacagaacgcgcaacacaaagactggcattgtactgaagagatgatggaactgacccgtgatggcgaagccctgtacatgcactgcctgccagctgatatcagcggcgtatcctgtaaagaaggtgaagtgactgaaggcgtattcgaaaaataccgtatcgctacctacaaagaagccagctggaagccttatatcatcgccgcgatgatcctgtcccgtaaatacgccaaaccaggtgcactgctcgagcaactgctgaaagaagcgcaagaacgcgtgaaataacccctcgggccgatcagctggtcggccctctatttccagaggccaaaaggataggatatgtccgttttcagtttgaagattgatatcgccgataacaaatttttcaacggcgaaacaagtccgctctttagccaaagccaggccaaactggcgcgccagttccaccagaaaatagctggttatcgcccaacaccgctttgtgcgctggacgatctcgcaaacctttttggtgtgaagaaaattctcgtcaaagacgaaagtaaacgattcggtctgaacgccttcaaaatgcttggcggtgcgtacgccatcgctcaattattgtgtgaaaaatatcatcttgatatcgaaacgctgagttttgagcacctgaaaaatgccatcggcgaaaaaatgactttcgcgaccaccaccgacggcaaccacgggcgcggtgtggcgtgggcagcacagcaactcggacagaatgcggtgatttacatgccgaaaggttctgctcaggaacgcgttgacgccattctgaacctcggtgccgagtgcatcgtcacggatatgaactatgacgataccgttcgcctgaccatgcaacacgcgcagcagcacggctgggaagtggtacaggacacggcatgggaaggttacaccaaaatcccaacctggatcatgcaaggctacgcaaccctggcagatgaagccgtcgagcaaatgcgtgaaatgggcgtaaccccgacgcacgttctgctgcaagccggtgtcggagcaatggccggtggtgtgctgggttatctggtcgacgtctatagcccgcaaaatctgcacagcattattgttgaacctgacaaagctgactgtatttatcgctccggcgtcaaaggcgacatcgtcaacgttggcggtgatatggccaccatcatggcaggcctggcctgtggcgaacctaacccgctgggctgggaaatcctacgtaactgcgccacccaattcatctcctgccaggacagcgttgccgcattaggtatgcgcgtgctgggtaatccgtacggcaacgacccgcgcatcatctccggtgaatccggcgctgtcggtttgggcgttctcgcagcggttcattatcacccgcaacgtcaaagcctgatggaaaaactggcgctgaacaaagatgccgtggtgctggttatcagcactgaaggcgacaccgacgtgaagcactaccgcgaagttgtctgggaaggcaaacacgctgtagcaccttaatcaccctattggaactgctccctgcaaaacggggagtaaaaaatctggagaaaaataatggctaagaatattccattcaaactgattcttgaaaaagcaaaagattaccaggcggatatgactcgcttcctgcgcgacatggttgctattcccagtgaaagctgcgacgagaaacgcgtagtacatcgtattaaagaagagatggaaaaagtcggcttcgataaagttgaaatcgacccgatgggcaacgttctcggttatatcggccacggcccgcgtctggtggcaatggacgctcatatcgataccgtcggcattggcaacatcaaaaactgggacttcgatccgtacgaaggcatggaaactgatgaactgattggtggtcgcggtacttccgaccaggaaggtggcatggcctctatggtttatgccggtaaaatcattaaagacctcggtctggaagatgaatataccctgctggttaccggtacggtgcaggaagaagactgcgacggtctgtgctggcagtacattattgaacaatccggcattcgcccggaatttgtggtcagtaccgaaccaaccgactgccaggtataccgtggtcagcgcggtcgtatggaaattcgtattgatgttcagggtgttagctgccacggttctgcaccagaacgcggtgataacgccattttcaaaatgggtccgattcttggcgaattacaagaactctcccaacgtctgggttatgacgaattcctcggcaaaggcaccctcaccgtttctgaaatcttcttcacatccccaagccgttgcgctgtagcagacagctgcgcagttagtatcgaccgtcgtctgacccggggcgaaacctgggaaggcgcgctggacgaaatccgcgccctgcctgcagtacagaaagctaacgcggttgtttctatgtacaactacgaccgtccgtcctggactggcctggtttacccaaccgaatgctacttcccgacctggaaagtggaagaagatcacttcaccgttaaagcactggtgaatgcctacgaagggctgtttggcaaagcgccggttgttgataagtggaccttcagtactaacggcgtatctatcatgggccgtcacggcattccggtgatcggctttggcccgggtaaagaacctgaagcgcatgcacctaacgaaaaaacctggaaatctcacctggtgacctgtgccgcgatgtacgctgcaatcccgttaagctggctggcaacagagtaattactcttcacttattcccctccggttcgccggagggtttttggagtttgctatgcgcgtattgatcaaaaacggcactgtcgttaacgcagatggacaagccaaacaggatttgctgattgaaagcgggattgttcgccagttgggcaacaatattagcccgcagctcccgtatgaagaaattgatgccactggctgttacgttttccctggcggcgtggatgtccatacgcatttcaatattgatgtcggcatcgcgcgcagttgtgatgatttttttaccggtacccgcgcagctgcgtgtggcggtacaacaaccattattgaccatatgggatttggcccaaacggctgtcggttacgccatcaactggaggtttatcgtggttatgccgcccataaagcggtcatcgattacagctttcacggtgtgatccagcacattaatcacgcaatcctcgacgaaatcccgatgatagtcgaggaaggactgagcagttttaaactctatttaacctatcaatacaaactcaacgatgacgaggttttgcaggcattacgccgcttgcatgaatccggcgcgctgaccaccgtgcacccggaaaatgatgcggctatcgccagcaagcgggcggaatttatcgccgcagggttaaccgcgccgcgctatcatgccttgagtcgccctctggaatgcgaagcggaagccatcgcccgcatgattaacctggcacaaattgccggtaacgccccgctctatatcgtgcacctgtctaacggcttaggtctggattatctgcgtcttgcccgtgcgaatcaccagccagtctgggttgaaacctgcccacaatatctcctgttggacgaacgcagttacgatacagaagatggcatgaagttcattcttagcccaccgctgcgtaacgtacgcgagcaggacaaactgtggtgtggcatcagcgatggtgcgattgacgtggtggcaaccgatcactgcaccttcagcatggctcaacgcctgcaaatttctaaaggcgatttcagtcgctgcccaaatggcttacccggtgtggaaaaccgcatgcagttactgttttccagtggcgtgatgacgggacgtataacaccggaacgctttgttgaattaaccagcgcaatgcccgccaggttgtttggcctgtggccgcaaaaaggattattagcgcccggttccgacggcgacgtggtgattatcgacccacgtcagagccaacaaattcagcatcgccatctccacgacaacgccgactacagcccatgggagggttttacctgtcagggcgcgattgtcagaaccttatcccgtggtgaaacgattttctgtgacggcacctttacaggcaaagccgggcgaggtcgtttcctgcgacgcaaaccgtttgtccctcccgtgctctaaccactgccagggatctatacacaatcaagaatgatgagtgaggaaaaatgagtaagaaaattgttctcgccctgggcgggaatgcgctgggcgatgacctggccgggcaaatgaaagcggtaaaaattacttctcaggcaattgttgatttaattgcccagggacatgaagttatcgtcactcatggtaacgggccgcaggtgggcatgattaaccaggcctttgaagctgccgcaaaaactgaagcgcacagcccaatgctgccgatgtctgtctgtgttgcattaagccagggttatattggttacgatctacaaaacgctttaagagaagaactgctttctcggggcattaataaacctgtagcaacgctggttactcaggtcgaagtcgacgctaacgatccggcattcctcaacccgaccaagccgatcggtagcttctttaccgagcaagaagcagagcaactgacaaaacagggttacactctgaaagaagatgctggtcgcggctatcgccgtgttgttgccagcccaaaaccggttgatatcattgaaaaagaaacggttaaagctctggtagatgcaggtcaggtggtgatcaccgttggcggtggtggtatccctgttattcgtgaaggtaaccatctgcgtggtgccagcgcggttatcgataaagactgggccagcgcccgtttagcagaaatgattgatgccgatatgctgatcattctgactgcggtagaaaaagtggccattaacttcggtaaagagaatgaacagtggctcgatcgcctgagtttaagtgatgctgaacgctttatcgaagaaggtcattttgcgaaaggttctatgctgcctaaagtggaagctgccgccagctttgctcgctctcgcgcaggtcgtgaagcactgattaccgtattgagcaaagcgaaagaagggattgaaggcaaaacaggaacggtgatttgtcagtaatttaaaggccgggtgggtaataccatccggccaaagattgtcaagtaagtgcgctttgttgatgccggatgcggcgcgagcgccttatccgtcctacaaaacatcgcaaattcaatagattgcaatgcacttgtaggcctgataagcgtagcgcatcaggcaatttggcgtttgtcatcagtctcaggccgggtgggtaataccatccggccattttcatttaagccacttccagcacttcttttgtcgctttcacgccctgatgcatcaacatcattaacgcctcaagtacgccgccgccaatcgcccgggctttatcagaaacgctggtgaaatcagcggtttcaccacgaggatcgatatcaccaattttaaaaccaccaaccactgccaggccgtcgttcaacaagccacgcaccatccccgtcaacggtgctttaatttcatgctcaccaatccaggcaatcacatcgccctctttcaccagatcgcctaatttcacgttggatcgcataatgcctgcagcaggagcacggatcacccgtcgggtggtatgccccataatattgccaggaacaccggtattctcctgcgcacaaccagagtaaatcacctgaccgagccagtgcccgcgatttgtttcaattaccgcatgacaatccttcccagcagtaaagcccggcccaagcgcgattgttactggtgccatatctgcccgcgttcccaaattctgtttcgccagaatagcgtccaccacgcaaagcggtttcagttcatcaagcaaactacaggcgggatctaccatcacaggaatgaatccgcgttcggtaagtttcatcgcttccgcagagctggttgccaggcgagcagtgacgccttcgaccgtcatttcgccatcgaacacggcctgggcaaacgccacggtacaacgaatcactgtcggtttttccacttccagcatgatcactttaaaacccgcatgatacagacgtagcgccacaccactggcgatatctcccgcaccgcgaatcaccaccagctggtgtccggaaggatgagaaggtttcatcatcagcccacccggcgcgttatttttcacctgtaatatttctgccagcacgctgatggcgatctcctgcggcgtttccgcacctatgttgtaaccaacgggcgcatgtaaacgggcaatatgttcttcagccacgcctttctcacgcaattgacgcaggaaaagctgaaccttgcgacgacttgccagcaaccccaaccatgcaatgggctgttcaatgagtttgtcgagggcttcacgatcctgattattcgtggcaatcaggacaaaattatcagggcgaatatccagtgcttccactgccgcaccaaagctctcagcatggagaagcgtggtacttggtgggaatagttcaggattgaggctttcgcgataaatatcagcaacggcaatatcaaatcctaatagcgccgcactctgggctatcgcccggttgacatgccccgcgccaatcaacaccagacgtggacgcataccatggacgctgataaatacactcattgcacctccacaatcactcccgacagcatccgcaccgttacgagccatacgtccatggaataatcgcggcttacgttcctgcaatgcctgaaggctctcttcaatcaccttccgctcaaccattccgccaccaattgtaccgacgatagaaccatcggcgcgcactaacatttgtgcagaatggcggggagtgctgcctcggctatcaacaatttgcgccatagcaaacggacaattttgctcttcgagttttgcagcctctgtgaaaatattcataccaacctcaatggatatcctttcagtaacccggaatacccgggccgttaattcacaaatctgcgcgcgattgcaggatgttcttgtatatcgcccagccagattgcctctacgtcgtgttgttgcagcggttgaaggagctcgctttgtgcaatcgcattctcacattgagaaaaacggttaatgaaccagactcgccgacaaccttgcggtacgtttttaaacgccccctgagggtggcgaaccagcgcaacgagatcgctcagttgcaaggttgcatcaggtgttaacccggtaatatcagcaaactggctccagcgatggacattttctgtgctcactttcgcgcccaaagtatgtcctcccatcacagcaatcacgcagcaactgcttttgggtatgcaaggttcgtgctcatcaggcgcttttaacggcattccacggctgccatctgcttcaatgagaattacgtcacactctggtcgttgcaccagtgcatcaatcgcttctggcgtaaatccctgcacttttccctggttcgctttccagctgtgaaaacaaaaactaatgggggatgtaagagacgcatgaggaagcatggcgggatcacgacagaaaaccacgggccagtgagacgttggcataaacatatgtgtcgtcgtcgtgattaacacacgcctgccgctagcctggagcagttctgccagccaaaaaagcaagctggttttccccccagcaccaacaacagaaatcacagtgggacgtttctgcgcacctaaatcaatgactaatgcgcttgggtcaactatacttttcacgagtctttatgacctctctgggataaattatccccaacttaatccatcaggaagtaacgcaattatcaggcgttattagcccctataaataatggaaccactatgagtgccatcgactgtataattaccgctgccggattaagtagtagaatggggcaatggaaaatgatgttaccctgggaacagggaacaattcttgatacaagtatcaaaaatgcgttgcagttttgtagccgaattattttagtcaccggctatcgtggtaatgaactgcacgaacgttatgcgaaccagagcaatatcactattattcacaacccagattatgcgcagggtttactaacatccgtcaaggccgcagtacccgcagtgcaaacagaacattgttttctcacccacggtgacatgccaaccctcaccatcgatatttttagaaaaatctggagcttacgaaatgatggcgcaatactgccactccataatggcatccccggccatccgattttagtgagtaaaccatgcctgatgcaggcaatccaacgacccaatgtcaccaatatgcgtcaggcactccttatgggagatcattattccgtcgaaatagaaaatgcagaaataattttagatattgatactccggacgactttattacagcgaaggaaaggtatactgaaatttaaaaaacgtagttaaacgattgcgttcaaatatttaatccttccggcactcattatcataatgataaggaatcactgattttgagaaaagagaaaaattgataaatgggctggcaataataattttcaggagtgattttaattctcatttagcacctgtgagttcattcacaaaaagcccttaagtttcgagccgcctcacatttttttatatttcccgccaaacctggcaagagtggtgcgattgttgctctatccccctaaaccaccggatttctcaacaccggtcactcaatgatatctgtataagctaaggagagggttatgggggatattatgcgtcccattccgtttgaggaacttttgacgcgcatatttgatgaataccaacaacaacgcagtatctttggtattcccgagcaacagttttacagtcctgtaaaaggtaaaactgttagcgtcttcggtgaaacctgtgccactcccgtcggccctgccgctggcccgcacacgcagctcgcgcaaaatattgtcacttcctggctgactggcggacgcttcatcgaactaaaaaccgtccaaattcttgaccgcctggagctggaaaagccctgtatcgatgccgaagacgagtgctttaacaccgaatggtctaccgagtttaccctgcttaaagcctgggatgaatacctcaaagcctggtttgccctgcaccttctcgaagcgatgttccagccttctgattccggtaaaagcttcatctttaatatgagcgtcggttacaacctcgaaggtattaagcaaccgccgatgcaacagttcatcgacaatatgatggacgcatctgaccatccgaaattcgctcaatatcgcgatacgctgaataaattactccaggatgacgcatttttagctcgccacggattgcaggaaaaacgcgaaagcttgcaagccttacccgctcgcatccccaccagtatggtgcatggcgtcaccctctccaccatgcacggctgtcctccgcatgaaatcgaagccatttgccgctacatgctggaagaaaaagggctcaacacctttgtgaaacttaacccgaccttactggggtacgcgcgtgttcgtgagatcctcgatgtctgcggtttcggttacataggcttaaaagaagagagttttgatcacgacctcaagctgacgcaagcactggaaatgctggaacgcctgatggcactggcaaaagaaaaaagtctcggctttggcgtaaaactgactaacactctcggcaccatcaacaataaaggcgcactgcctggtgaagagatgtatatgagtggccgtgcgctgttcccgctctccatcaatgttgcagcagttctctctcgcgcctttgacggcaaactgcccatttcttattccggtggtgccagtcagctgactatccgcgatatttttgatacaggtattcgccctattactatggcaaccgacctgctgaaacctggcggctatctgcgcttaagtgcctgcatgcgcgagctggaaggctccgacgcctggggacttgaccatgttgacgtcgaacgactgaacagactggcagcagatgcgttaaccatggaatacacccagaaacactggaagccagaagagcgtattgaagtggcagaagacctgccgctgaccgactgctacgttgccccctgtgttactgcctgcgctatcaagcaagatattccggaatacatccgtctgcttggcgaacaccgctatgccgacgcgctggaactcatctaccaacgcaacgctctgcccgccattaccggtcatatttgcgatcaccagtgccaatacaactgtacccgcctggattacgacagtgcgctgaatatccgcgaactgaaaaaagtcgcgctggaaaaaggttgggatgaatataagcaacgctggcacaaaccagccggttctggtagtcgccatccggttgccgtgattggtgcaggtccggcgggtctggcagcaggttacttccttgccagagcgggccatccggttacgctgtttgaacgcgaagccaatgcgggcggcgtggtgaaaaatatcattcctcagttccgtattcctgcagagttaattcagcacgatatcgattttgttgccgctcacggcgtgaaatttgagtatggctgcagtcccgatttaaccattgagcagttaaaaaatcagggcttccactatgttctgattgccaccggcactgataaaaatagcggtgtgaaactggcgggcgacaaccaaaatgtctggaaaagtctccccttcctgcgtgaatacaacaagggtacagcgctcaagctgggcaaacatgtggtcgttgtcggggcgggtaacaccgcaatggactgcgctcgtgcggcgttacgcgttccaggcgtagaaaaagcaacgatcgtttaccgtcgtagtctacaagagatgcccgcatggcgcgaagagtatgaagaagcgttgcacgacggcgtagagttccgtttcctgaataatccggaacgtttcgatgctgatggcaccttaaccttgcgcgttatgagccttggcgaaccggatgagaaaggtcgtcgtcgtccggttgaaaccaatgaaacagtaacactgcttgtagacagcctgatcaccgccattggtgaacagcaggatactgaagccctgaatgcgatgggcgtgccgctggacaaaaacggctggccagacgtcgaccataatggcgaaactcgtctgactgacgtctttatgatcggcgacgtacagcgcggaccatcctccattgtcgctgctgtcggaaccgcgcgtcgggcgaccgatgccatccttagtcgggaaaatatccgttcccaccagaacgataaatactggaacaacgtcaatccagcggaaatctatcaacgtaaaggcgatatctctatcacgctggtgaacagtgacgatcgtgacgcgtttgtcgcccaggaagccgctcgctgcctcgaatgtaactacgtttgcagcaagtgtgtggatgtctgcccgaaccgcgccaacgtctccattgcggtcccaggcttccagaaccgtttccagacgctgcacctcgacgcttactgtaacgaatgcggcaactgcgctcagttctgtccgtggaacggtaaaccgtacaaagacaaaatcaccgtcttcagcctggcgcaagactttgataacagcagcaacccaggcttccttgtggaagattgccgggtacgagtacgtctgaataaccaaagctgggtgttaaacatcgacagcaaaggtcagtttaacaacgtaccaccggagctgaacgatatgtgccgcatcatcagccatgtccaccagcatcatcattatctgctgggccgcgtggaggtgtaatcatgttgattctgaagaatgtcactgcggtacagctacacccggcaaaagtgcaggaaggcgttgatatcgccatcgaaaacgatgtgattgtcgctatcggcgatgccctgacgcaacgctaccccgacgccagcttcaaagagatgcatggccggattgtgatgccagggattgtctgcagccacaaccatttttacagcgggctttcccgcggaattatggcaaacatcgcccctttgcccggatttcatcagtacgctgaaaaatctctggtggcggctcgatcgcgcccttgatgaagagagcctctattacagcggactgatttgttccctggaagcgattaagagcggatgtacaagcgttatcgatcaccatgcctctccggcgtatatcggcgggagactctccacattgcgcgacgcatttttaaaagttggcctgcgcgcgatgacctgttttgaaactactgaccgtaacaacggcatcaaagagttgcaggaaggtgtagaagaaaacatccgtttcgcccgtttgattgatgaggcgaagaaagcgacaagcgagccgtatctggtggaagcacatatcggtgctcacgcgccgtttaccgtgccggatgccggtctggagatgctgcgtgaagccgtgaaagccacaggccgtggtttgcatattcacgctgcggaagacctttacgacgtttcctacagtcaccactggtacggcaaagacctgctggcacgactggcgcaattcgatctcatcgacagcaaaacgctggtcgctcatgggctgtacttgagcaaagatgacatcaccctactcaatcagcgcgatgcgttcctggtgcataacgcccgtagtaacatgaacaaccatgtcggctacaaccatcaccttagcgacatccgcaatctggcgttgggaacggacggcattggtagcgacatgtttgaagagatgaaatttgccttctttaaacatcgcgatgcgggtggtccgctgtggcctgacagttttgccaaagccctgactaacggtaacgaactgatgagccgcaactttggcgcgaaatttgggcttctggaagccggttacaaagctgatttaaccatttgcgattacaacagcccgacgccgctgctggcagacaatatcgccgggcatatcgctttcggtatgggcagtggcagcgttcacagcgtgatggtcaatggtgtgatggtctatgaagaccgtcagtttaacttcgattgcgattccatttatgcacaagccagaaaagccgctgccagtatgtggcgtcggatggatgcgctggcataaatgacagatgccctcttcccgcagggaagagggttaaataaggaaagaagatgattgaacaatttttcaggcccgactctgtcgaacaggcgctggaactgaagcgccgctaccaggatgaagccgtctggttcgccgggggcagcaaactcaatgctacaccaacccgtaccgataaaaagattgccatttccttacaggatctggaactggactgggttgactgggataacggtgcactgcggattggcgcaatgtctcgcttgcagccactgcgtgatgcgcgatttattcctgcagcgctgcgtgaagccctcggttttgtttacagtcgccatgttcgtaatcagagcaccattggtggtgaaatcgccgcccgccaggaagagagcgtgctgcttcccgtcctgttggcactggatgctgaactggtttttggcaacggcgaaacgctgagtatcgaggactacctggcctgcccatgcgatcgcctgctaaccgaaattatcattaaagatccgtatcgcacctgtgcgacccgcaaaattagccgttctcaggcaggtttaaccgtcgtgacggcagccgttgcaatgacagaccacgacggtatgcgaattgcgctggatggcgtcgccagtaaagcactgcgtctgcatgatgtcgaaaaacaaaatctggaaggcaatgcacttgaacaggctgtcgccaacgccattttcccgcaggaagatttgcggggcagcgtggcctataaacgctatatcacgggagttctggtagccgacctgtatgccgactgccaacaggctggggaggaagccgtatgatcatccactttactttaaatggcgcgcctcaggagctaaccgttaatccaggcgaaaacgtgcaaaagctgttgtttaacatgggaatgcactctgtacgcaacagtgatgatggtttcgggtttgccggttctgacgcaataatctttaacggtaatatcgttaacgcgtccttgcttattgccgcacagttagagaaggcagatattcgtaccgcagaatctctgggcaaatggaacgagttaagtctggttcaacaggcaatggttgatgttggcgtggtgcagtctggttataacgatccagctgcagctctgattatcaccgatcttctcgatcgcatcgccgcacctacccgcgaagagatcgacgacgcgctttctggtttgttcagccgcgatgctggctggcagcaatactatcaggtcattgaactggcggttgcacgtaaaaataatccgcaggccaccattgatatcgctccgactttccgtgacgacctagaagtcattggtaagcattatcctaaaactgatgccgcgaaaatggtgcaggcgaaaccctgctatgttgaagaccgcgtaacggctgacgcctgcgtcattaaaatgttacgtagcccacacgctcacgcactgattactcatctggatgtcagcaaagctgaagccttaccgggcgtcgttcacgttattactcacctgaattgcccggatatctactataccccgggtggtcagagcgcaccggaaccgagtccgcttgaccgccgtatgttcggcaagaaaatgcgtcacgtcggcgatcgtgttgctgcggtcgtcgcagaaagtgaagaaattgcgctcgaagcactgaagctcatcgacgttgaatatgaagtgcttaagccggtaatgagcatcgacgaagcaatggcggaagatgcgcctgtcgtgcacgatgaaccggtggtgtatgttgctggtgcgccagatactctggaagacgataacagccatgcagcccagcgcggcgagcatatgatcatcaacttcccgatcggttctcgccctcgcaaaaatatcgccgccagtattcatggtcatattggcgatatggacaaaggctttgccgatgccgatgtgatcattgagcgaacctataacagtacgcaagcgcagcagtgcccgactgaaacacatatctgctttactcgtatggacggcgatcgtctggttatccacgcctccacccaggtaccatggcacttacgccgccaggtcgcgcgcctcgtgggcatgaaacagcataaagttcatgtcattaaagagcgagttggcggcggttttggttccaaacaggacatcctgctggaagaagtgtgcgcctgggcaacctgcgtgaccgggcgtccggtactgttccgctacacccgtgaagaagagtttattgctaacacctctcgtcacgtcgcgaaagtcaccgtcaaactgggagcgaaaaaagatggtcgcctgacggcagtgaagatggatttccgcgccaacactggcccttacggcaaccacagtctcaccgtaccgtgtaacggaccggcgctgagcctgccgttatatccgtgcgataacgtcgatttccaggtcaccacctactacagcaacatttgcccaaatggtgcttatcagggttatggcgcaccgaaaggtaacttcgctatcaccatggcattagcggaactggctgaacagttacagatcgaccaactggaaattatcgaacgtaaccgggtacacgaagggcaagagctgaaaattctcggtgcaatcggtgaaggtaaagcgccgacctccgttccttccgccgccagctgtgcactggaagagatcctgcgtcagggtcgcgagatgatccaatggagcagtccgaaaccgcaaaatggtgactggcacatcggtcgcggcgtcgccattatcatgcagaaaagcggtatcccggatatcgatcaggctaactgcatgatcaaactggaaagcgacggcacctttatcgttcattctggcggtgcggatattggtactggtctggatactgtagtgacgaaactggcagcagaagtgctgcactgcccaccgcaggacgtgcatgttatctccggtgataccgatcatgcgttgtttgataaaggcgcatatgccagctccggtacttgcttcagcggtaacgcggcgcgtttggcagcggaaaatctacgggagaaaattctgttccacggcgcgcaaatgttgggtgagccagtggcagatgttcaactggcaacgccgggcgtcgtgcgcggcaagaaaggcgaagttagtttcggggatattgcccataaaggcgaaaccggcaccggctttggtagtctggtgggaactggcagttatatcacgcctgatttcgccttcccgtatggcgcaaacttcgctgaagttgccgtcaacacgcgtacgggtgaaatccgcctggataaattctacgccttgctggactgcggtacaccggtcaatccagagttagcgttgggacaaatctacggtgccaccctgcgtgctatcggccacagtatgagcgaagagatcatttatgacgccgaaggtcacccgttaacgcgtgatttacgcagttacggcgcaccgaaaattggtgacattccgcgtgatttccgcgctgtgctggtgccgagcgacgataaagtcggcccgttcggggcgaaaagcatcagcgaaatcggtgtaaatggcgcagctccggcgattgctaccgcaattcacgatgcatgcggcatctggttacgcgaatggcatttcacaccggagaaaatactcactgcgctggaaaaaatataaataataaatggccgcttcggcggcctgtttctctgtttgaacgatgactaaatagtgactgcgaaaatgagataagccgttctcaaggcgtcctgcgccccaaattcgtgggaatttattttactaattcagatgatcaaatttactttaaaaggagtgaagggatgtctgatataaaccatgcaggttctgaccttatatttgaactggaggatcgccctccctttcatcaggctctcgttggtgccattacccatctgttggcaattttcgttccgatggtaacccccgcgttaatcgtgggtgcggccttacagctttccgctgaaacaactgcctatcttgtttctatggcgatgatcgcctctggtattggtacctggttacaagtaaaccgctacggcatcgtcggttctggcctactcagtattcagagtgtcaattttagttttgttacggtcatgattgcgctgggcagcagcatgaaaagcgacggttttcacgaagagttaatcatgagcagccttctcggcgtctccttcgttggcgcatttctggttgtcggatctagttttatcttgccctatttacgtcgggttattacgcctaccgtcagcggtattgtggtactgatgatcggcttaagcctgattaaagtcggcattatcgattttggtggaggatttgcagccaaaagcagcggtacgttcggcaattacgaacatctcggcgttggtttattggttttaattgtggtgatcggctttaactgctgtcgcagtccgttgctacgcatgggagggatcgccattgggctatgtgtcggctatatcgcaagcttatgcctgggcatggtggatttcagcagtatgcgcaatttgccgttaatcaccatcccgcatccgttcaaatacggctttagttttagcttccatcagttcctggtggttggcacgatttatctgcttagcgtgctggaagcagtcggcgatatcaccgccacggcaatggtttcccgccgccccattcagggggaagagtatcagtcccggctgaaaggcggcgtgctggcagatggtctggtttctgttatcgcctccgctgtcggtagtttaccattaaccacgtttgcgcaaaataatggggttattcagatgactggcgtcgctagtcgttatgtcgggcgaaccatcgcggtaatgctggttatcctcggcttatttccgatgattggcggcttcttcacgaccattcccagcgcagttctgggaggcgcaatgacgttgatgttttccatgattgccatcgcagggattcgcatcatcatcaccaacggtttaaagcgccgtgaaacacttattgtcgccacttctttaggtttagggcttggcgtctcctacgatcccgaaatttttaaaatattgccagcctctatttatgtattagttgaaaaccctatttgtgctggcgggttaactgcgattttattaaatattatcctccctggtggctaccgacaggaaaacgttctgcctggtattaccagtgcggaagagatggattaacagtaaaggagtcaatgatgagtggagaacacacgttaaaagcggtacgaggcagttttattgatgtcacccgtacgatcgataacccggaagagattgcctctgcgctgcggtttattgaggatggtttattactcattaaacagggaaaagtggaatggtttggcgaatgggaaaacggaaagcatcaaattcctgacaccattcgcgtgcgcgactatcgcggcaaactgatagtaccgggctttgtcgatacacatatccattatccgcaaagtgaaatggtgggggcctatggtgagcaattgctggagtggttgaataaacacaccttccctactgaacgtcgttatgaggatttagagtacgcccgcgaaatgagcgcgttcttcatcaagcagcttttacgtaacggaaccaccacggcgctggtgtttggcactgttcatccgcaatctgttgatgcgctgtttgaagccgccagtcatatcaatatgcgtatgattgccggtaaggtgatgatggaccgcaacgcaccggattatctgctcgacactgccgaaagcagctatcaccaaagcaaagaactgatcgaacgctggcacaaaaatggtcgtctgctatatgcgattacgccacgcttcgccccgaccagttctcctgaacagatggcgatggcgcaacgcctgaaagaagaatatccggatacgtgggtacatacccatctctgtgaaaacaaagatgaaattgcctgggtgaaaagcctttatcctgaccatgatggttatctggatgtttaccatcagtacggcctgaccggtaaaaactgtgtctttgctcactgcgtccatctcgaagaaaaagagtgggatcgtctcagcgaaaccaaatccagcattgctttctgtccgacctccaacctttacctcggcagcggcttattcaacttgaaaaaagcatggcagaagaaagttaaagtgggcatgggaacggatatcggtgccggaaccactttcaacatgctgcaaacgctgaacgaagcctacaaagtattgcaattacaaggctatcgcctcagcgcatatgaagcgttttacctggccacgctcggcggagcgaaatctctgggccttgacgatttgattggcaactttttacctggcaaagaggctgatttcgtggtgatggaacccaccgccactccgctacagcagctgcgctatgacaactctgtttctttagtcgacaaattgttcgtgatgatgacgttgggcgatgaccgtagcatctaccgcacctacgttgatggtcgtctggtgtacgaacgcaactaataataaaactttaacatcctcgtgaggacatcattatgtctggagacatcctacaaacaccggacgcaccaaagccacagggcgcgctggataattattttaaaattaccgctcgtggcagtaccgttcgtcaggaagtactggctggcttaacgacctttctggccatggtttattccgttatcgtcgttccgggaatgctgggcaaagcaggttttcctcccgcagctgtgtttgttgccacctgtctggtcgcgggcttcggcagcttgctgatgggattatgggctaatttgccaatggcgattggttgcgcgatttccttgacggcgtttaccgcattcagtctggtactcgggcaacaaattagcgttcctgtcgcactgggcgcggtatttctgatgggcgtcatcttcaccgccatttccgtaaccggtgtgcgtacctggatcttacgtaatttgccgatgggtatcgctcacggtacaggtatcggtatcgggctgtttctgctgctgattgctgctaacggtgtgggtatggttatcaaaaacccgattgaaggcttgccagtggcgctcggtgcgtttacctccttcccggtgatgatgagcttgctggggctggcggtcatcttcggcctggagaagtgtcgcgtacccggcgggatcttgttggtgattattgcaattagcatcatcggcttaatctttgacccagcggtgaaataccacggtctggtggcgatgccaagcctgactggcgaagatggtaagtctctgattttcagcctcgatattatgggtgcactccagccaactgtacttccgagtgtactggcattggtgatgaccgcagtgttcgacgctactggcaccatccgtgccgtcgccggtcaggcgaatttgttggataaagacaaccagatcatcaacggcggcaaagccctgaccagtgacagtgtaagtagtatattctccggcctggtgggcgcagcgcccgcagcggtttatatcgaaagtgcggcaggaaccgccgccgggggtaaaacaggtttaaccgcaaccgtagtgggggcgttattcctgttaattctgtttttaagtccgctgagttttttgatccctggttacgccactgcacccgctctgatgtacgtaggtttgctgatgttaagtaacgtcagcaagctggatttcaatgattttattgacgctatggctggcctggtgtgtgccgtgttcatcgttctgacttgtaatatcgttaccggtattatgctgggctttgtgacactggtcgtaggccgcgtctttgcacgcgaatggcaaaagctgaatattggtacggtgatcattactgccgcactggtcgcattttacgcgggtggttgggcaatctaatagattctccgcgcctttcagcgcggagatttctttcagagaggattctcaccgctggcaacaatacgctgctggcggactcgcctgagttctctttcagtaagcaactgcagcgcctgtgttgggcaagattcaacgcaggctggcccctcttcccgctgttcacagagatcgcatttcacaatttgttgtcgggtatcccccggcaagctctgaatggtgatcattccaaacgggcacgcactgacgcaactctgacagccaatacaacgggcagaattggtctgcaccacctgctcgcccatcgtcagcgcccccacggggcaagcgccaacacaaggggcgttttcacactgatggcacatcaccggcgcactgatgctgtccagtcgctgtaccttcagccggggtaaaaagacatcggcattcaactcctgttcactagggtgagcgaccacacaggctacttcacaagtacggcagccaatacagtcagccggattaacgataattaagcttttcatcagcttgccttcgtatcaaacagagttaacatatcgcgcgccgcctgccttcctgcggccattgcagtgacaaccagatccgcgccatgaactgcatcaccaccagcaaagacttttttcagatgcgtctgggtaggtaaatacccgacgtcaccggtttgaatcaggccccatttatcgagtttaattccgctgccctgcaaccacggcatggcatgcgcctggaaaccaaaggccataatcagaacatcggcgggcaattcaaactcactacccgctaccggacgaggacgacggcgaccatccggccccggctcacccatggcggtacgaatcaggcccaccgcagttaaacgcccatcttcgtcacaagcgatatattgcggttgaacattgaactgaaactcgacaccttcctcgcgcgcattaaccacctctttgcggctgcccggcatactgacttcatcacgacgatacgcgcaggtcacgctggcggcattgaggcggatggaagtccgcaaacaatccattgtcgtatcgccaccgcccaataccacgactcgcttaccttccacgtccgtcagcggatactcttcagactccggcaatcccatgagctggcgggtatgggcagtcaggaacggtagagcctgaatgacaccgggcgcatcttcatgcggcagatctgctcgcatcatcccgtaagtccccacgccgatgaaaactgcatcatattcagaagttaaatcgctaaaggtaatatcgcggccaatttcacagttaagatgaaagtcgattcccattgcggtgaatatctctcgccgctggcttaataccgttttatcgagtttgaaaggaggaatgccaaaagtcagcataccgccaatttctggatggcgatcaaagacatcgacctgaactcctgcgcgcgccagaatatcagcacaccctaaccctgcaggcccagcgccaatcaccgccactttttcgctacggggaacaactttgctgacatcgggacgccaacccatcgccagcgcggtatcggtgatgtagcgttccagattaccgatagagactgcgccgctgtgatctttcaaagtacatgcgccttcacaaagacggtcctgtggacataccctgccgcaaatttctggtaaggaactggtctggtggcaaagttctgccgcttcaataatctttccttcctgtaccagacggatgtaatccggaatagcgttatgcagcgggcaatgccagttgcagttagctttttcggcacaataaacacagcggtcactctcataagtcgcttgttgtggatccagcccgcaatatatttcgccaaagtgggttttccgttcactcgcactaattttatctgcgcctttacggctgttaacggggagcaacgctgcactgcgagatggctgagcgtcactactcgcttttcctgctgccgttttgcgctggcgggccacctttatctgctgcaaccctttatcgtccatcagtcgtaacgcctgtgttgggcaaacttcaatacaggcttgcgtgccggaactgcgctggttacaaaggtcgcatttctgcgcaatcgtatcgaccatctcaacgacgccaaaggggcaagcgattgcgcatcttttacaaccaatacatttttgctcgtccagttgtacgctatcggactggaaagtcagagcattaaccggacaagccgtaacgcaaggggcattgttgcagtgatggcaggccaccggattcgcagcctggcctttccctacaacgtggatacgcggtcgaaagtcactgtgactcagcggccagttttcttgattgtgtgccaccgcacaggcaatttcacaagcatgacagcctatacattccgcagcttcagcagcaataaacttattcatttgcatccctttcatttaatgagttatgtcttctcaaatttcgcgatgcaataaacgggcatatattaggtagcatgaccgttttaattataattttgcgactgagttcaaattattgcccctcaatctatgccgctttcattatttcaacattgccgatcaaaagagcgctatccagataaaaacgattaaatgcgagagtgcgacatgccagaatgattaatgaaatatcaatatgagaaaattacagataattccattgtcaggttctcttctcattttcgtggtttaaccacgattatgtgattgcctccgcaattcctgtctctaactccccttcctcgcaaaaactggcactccacgagcatgtgtttagacagtttcattaacgtaaacggttgctttttactctggcgggcgaaaggagaaacactgatgagcgccatagattcccaacttcccagttcttctgggcaagaccgcccaactgatgaggttgaccgcatattaagtccaggaaagctgatcatactcggtctgcaacacgtccttgtcatgtacgcaggtgcagtcgctgttcctcttatgattggtgaccgactgggcctcagtaaagaagctattgcgatgctcattagcagcgatctcttttgctgcgggatcgtcacattattgcaatgtatcggtatcggccgctttatggggatccgcctgccggtgattatgagcgtgacctttgctgctgtaacaccaatgatagccattgggatgaacccggatatcggcctgctggggatatttggtgccactatcgccgcgggttttatcaccacattattagcgccacttatcggtcgcttgatgcctttattcccgccactggttaccggtgtggttattacttctatcgggcttagcatcattcaggtgggtattgactgggccgccggaggtaaagggaatccgcaatatggtaatcccgtttatttaggtatctcctttgccgtcttaatttttatcttgctcattactcgctatgcgaaaggatttatgtccaacgtcgccgtattactggggattgtatttggctttttacttagctggatgatgaatgaagtcaatttatccgggctacatgatgctagttggtttgcgattgttacgccgatgagctttggtatgccgattttcgatcccgtttccattctgaccatgactgccgtgttaatcatcgtgtttatcgagagtatggggatgttcctggcactgggtgaaatagtcggtcgtaaactctctagccacgatattattcgcgggctgcgtgtcgatggcgtagggacaatgataggcggcacgtttaacagcttcccccacacgagtttttctcaaaacgttggcctggttagcgtgacgcgcgttcatagccgctgggtgtgtatttctagcggaattatattaatcctgtttggcatggtgccaaaaatggcggtgctggtagcctccattccgcaatttgtgctgggcggcgctggtctagtgatgttcggcatggtactggcgacagggattcgaattctgagccgctgtaactacaccaccaaccgttacaacctctatattgtggcgatcagtctcggcgttggcatgactccgacgctctctcacgatttcttttctaagttaccggccgtactgcaaccgctgctacatagcggcattatgctcgcaacccttagcgccgttgtgctgaacgtcttctttaatggctatcagcatcatgctgacctggtgaaggaatccgtctctgataaagatttaaaagtcaggacagtacgtatgtggcttctgatgcgcaagctgaagaaaaatgagcatggagaataatatgaattttttaatgcgcgctatattcagtctgttgttgctttttactctctctattcctgtcatttctgactgtgttgcaatggccattgaaagtcgcttcaaatatatgatgctacttttttaaatggtttttacctgtcggcatccgctcaaaacgggcggttgtcgataaacgctcacttggttaatcatttcactcttcaattatctataatgatgagtgatcagaattacatgtgagaaattatgcaaacggaacacgtcattttattgaatgcacagggagttcccacgggtacgctggaaaagtatgccgcacacacggcagacacccgcttacatctcgcgttctccagttggctgtttaatgccaaaggacaattattagttacccgccgcgcactgagcaaaaaagcatggcctggcgtgtggactaacagcgtttgtgggcacccacaactgggagaaagcaacgaagacgcagtgatccgccgttgccgttatgagcttggcgtggaaattacgcctcctgaatctatctatcctgactttcgctaccgcgccaccgatccgagtggcattgtggaaaatgaagtgtgtccggtatttgccgcacgcaccactagtgcgttacagatcaatgatgatgaagtgatggattatcaatggtgtgatttagcagatgtattacacggtattgatgccacgccgtgggcgttcagtccgtggatggtgatgcaggcgacaaatcgcgaagccagaaaacgattatctgcatttacccagcttaaataaaaaaaccccgacatttgccggggttgtgagcataacgtaatgcttattttaccggacgcatcgccgggaacagaataacgtcgcggatggtatggctgttggtgaacagcattaccatacggtcgataccaattcccagacctgctgtcggcggtaagccatgttccagtgcggtgacgtaatcttcatcgtagaacatcgcttcgtcgtcacctgcgtctttcgcggcaacctgatccaggaagcgttgcgcctgatcttccgcgtcattcagctcgctaaagccgttaccgatttcacgaccaccaatgaagaactcaaagcggtctgtgatttccgggttaacgtcgttacgacgcgccagcggagaaacttctgccggatattcagtaatgaaggtcggctgaatcagatgtgcttctgccacttcttcgaagatctcggtaacgatacggcccagaccccagctcttctcaacgtggatgccgatagattcagcaattgctttcgcagagtcgaagttgtccagatccgccatgtcggtttccgggcgatatttcttgatcgcttcacgcatggtcagtttttcgaacggtttaccgaagtccagcgtcacgtcgccgtaggtcacttccgtcttaccgagaatatcctgtgccagagtacggaacaggctttcggtcagctcgatcagatctttgtaatctgcgtaagccatgtagagttccatcatggtgaactctgggttatgacgtacggaaataccttcgttacggaagttacggttgatttcgaatacacgctcgaagccaccaaccaccagacgcttgaggtacagttccggcgcgatacgcaggtacatgtcgagatccagcgcgttatggtgggtgataaacggacgcgcagcggcaccgccagggatcacctgcatcatcggcgtttcaacttccataaagccgcggttcaccatgaactggcgaataccagagaggatctggctgcgcactttaaaggtgttgcgggattcatcgttggagatgagatcgagataacgctgacgatagcgcgcttcctgatcctgcaagccgtggaatttatccggcagcggacgcagtgctttggtcagcagacgcaactcggtgcagtggatagacagttcgccggttttggttttgaacagcttacctttcgcgccgaggatgtcgccgaggtcccattttttgaactgctcgttataaacgccttccgggagatcgtcacgggcaacgtacagctgaatgcgaccgccaacgtcctgcagggtaacgaaagacgctttacccataatacgacgggtcatcatgcggccagcaacggcgacttcgatgttcagcgcttccagttcttcgttctctttgccgtcgaattctgcgtgcaattggtcagaggtatgatcgcgacggaaatcgttcgggaaggcaatcccctgctcgcgcaggttcgccagcttctcacgacgcgttttcagttcattgttaagatcgactaccgcgtcagcgccctgtgcgtgttgttcagacatgttggttcctcataaccctgctttcaaacttgcttcgataaattgatccaggctgccgtccagcacggcctgcgtgttgcgggtttctaccccggtgcgcagatctttaatgcgggagtcatcaaggacataagaacgaatctggctgccccagccgatgtcggatttgttatcttccatcgcctgtttctcggcatttttcttctgcatctccagttcataaagcttcgctttcatctgcttcatggcctgatctttgttcttgtgctgggaacggtcgttctggcactgggtcacgatcccggtcgggatgtgggtaatacgcaccgcagattcggtacggttaacgtgctgaccgcccgcgccggacgtgcgataaacgtcaatgcgcagatccgccgggttgatttcgatatcaatatcatcatcaacttccggataaacaaacgcggagctgaagctcgtgtggcgacgaccgccggagtcaaacgggcttttacgcaccaggcggtgaacgccggtttctgtacgcagccagccgtaagcgtaatcgccggagattttgatcgtcacggatttaatacccgccacttcaccttcgctctcttcgatgatttcagttttgaaaccacggctttctgcccagcgcagatacatacgctcaagcatgctcgcccagtcctgtgcttccgtaccgccagaccccgcctgaatatcgaggtagcagtcggcgctgtcatattcgccagagaacatacggcggaactcaagctgcgccagtttttcttccagggcgtcgagttcagcaacggcttcgttaaaggtttcttcgtcgtcagcttctacagccagttccagcagaccagaaacatcttccagcccctgtttcatttggtcgagggtgtcgacaacggcttcgagggaggaacgctctttacccagcgcctgtgcgcgttcgggttcgttccagacatccggctgttccagctcggcgtttacttcttccagacgctctttcttggcgtcgtagtcaaagataccccctaagaacgtcggagcgttccgtgaggtcctgaatgcgattatttaccggattaatttcaaacatggtctgatttcttttattgagctagtcaaaatgcggtgataagagcgggattgtacccaatccacgctcttttttatagagaagatgacgttaaattggccagatattgtcgatgataatttgcaggctgcggttgccgcgaaactcgttgatatcgagcttataagccagttgcacttcgcgcacgccgttatccggccagagggcggtatcgacattaaaagcaataccatccagcagtggaccgccgccgaccggttcgaccatcaccttcaaatgacgttcgcccaccagccgctgttgcagcagacggaaatgaccgtcaaacagcggctccgggaacatctgcccccacgggccagcatcgcgcagcagctgcgccacttccatggtcatttcggccgggcttaacggaccgtcacttaccacttcgccttgcaataggctagggtccagccactcagtaaccagttcgccaaaccgttgttgaaagagtttgaatttatcctcttccaggctcaaacccgccgccatcgcatgaccgccaaacttcagcatcatgccagggtagagtgtgtctaatcgctccagcgcatcacgcatatgcagcccctgaatggagcgaccggaacctttcagcgtaccgtcacctgctggcgcaaacgcgataaccggacggtgaaaacgctctttgatgcggctagccagaataccgacaacgccctgatgccattcggggtgatacattgccagcccgccgggtagcgtgtcacggctgcgctccagtttctcgcacagggtcagggcttcaatttgcattccttgttcgatctcttttcgcgtctggtttagcgcatcgagttcatttgccagcacgcgcgcttcgccgatgttgtcgcacaacaacagcgccacaccgacggacatatcgtccagtcgtccggcagcattgagacgtggccccagcgcaaaacctaaatcgctggcggcgagtttttgtgcatcacggtttgccacttcaagcagcgctttaatccccggacggcactttccggctcggatgcgactcatcccctgccaggtcagaatgcgattattagcgtccagcggcacgacgtccgccactgtccccagcgcgaccagatccagcagttctgccaggttaggaattgcgatgttacgctcatcaaaccagccctgatcgcgcaaaaaggtgcgcagcgccagcatcagataaaacgccacacccacgcctgccagacttttgctcgggaaattacagtcgcgcaagttagggttaatgatcgcttccgctgcgggtaatgtgtcgcctggcaaatggtgatcggtaacaataaccgggatgcccaagctgcgagcgtgctcaacccccgcatgggaggaaataccgttatccaccgtgacaattaactgcgcgccacgggcatgggcctgatcgaccacttccgggcttaagccgtaaccgtcttcgaaacggtttggtaccaggtagtcgatattgctgcaaccaaggctgcgcatcgccagcacgcttagagccgtgctggtcgcgccgtcggcgtcgaaatcaccgaccacaataatccgcgttccttcgcgaaaagcgttgtaaaggatctcaacggccttttcgacgccgctcagttgctgccagggcagcatacctttaacactgcgttccagttcttgcgcactgcgtactccccggctggcgtataaacggcgcagcaagggaggcaattcagcgggcaagtctgccgtttcatcgacttcacggcgacgaagttgtatctgttgtttcacgcgaattatttaccgctggtcattttttggtgttcgtcgaggaattctttcatctctttcggcggctggtaacccggaacaagtgtgccattgctcagcacaactgccggagtaccgctaacgccaagctggacgccaagtgcgtaatggtcggcaatatccacgtcgcaactggctggtgcgacgcttttacctgccatcacatcatcaaacgctttgtttttatctttcgcacaccagatagctttcatttctttctctgcatcgctgtccagcccctggcgcgggaaagcaagataacgcacggtgatccccagcgcgttgtagtctgccatttgctcatgcagtttgtggcagtaaccacaggtaatatcagtaaacacggtgatgacgtgtttttcctgcggcgctttataaacgatcatctctttttcaagcgcattcaactgctttaacagcatcttattggtgacattgaccggagccgtgccactaacgtcatacattggcccctgaatgatatgtttaccatcatcggtgatgtacaacacgccgctgttagtcagaactgtcttcatgccagctacaggcgcgggctgaatatcgctgcttttgatgcccattttggctaacgtttgttgaattgccgcgtcatcagcctgagcaaagccactaaacgccgctaacaaagtaaacaacataaaacctttcttcataaatcttcccgttcttttcagacatcacgcccgcgggtgatgctgttgatgaagttgccgcagacgctcggtagcgacatgcgtataaatttgcgtggtggagagatcgctgtggcccagtagcatctgcaccacgcgtaaatccgcaccatgatttaataaatgagtggcaaaagcgtgacgcaacacatgcggactcagcttttcgctgtcgatacccgccagcacagcataatgtttaatacggtgccagaaggtctgtcgcgtcatctgctgcgcacgctggctgggaaacaacacgtcaatactcacaccattcagcagccacggacgcccatgttccagataggtttccagccagtaaaccgcctcttcacctaacggcaccagacgctctttgttgcctttaccaatgacccgtaccacgccctgacgcaggctgatatcactcattgtcagtccgaccagttcagagacacgcagcccggtagcatacaacacttcaagcatggctttatcgcgtagctccagtggctgatcgattaatggtgcctgtaataaacgttcgacctgcgcttcgcttaaatcttttggcaaacgctggggcaatttcggactagcgagatgcgcactgggatcgtcttcacgaaacttttcgcgataaagatactggaacaatcggcgcactgcactcagcaaacgcgcactgctggtggctttatacccgccctccagccgttctgccagtaatgcctgcaaatcgtcactttgcgccgtcgccagcgtcaacccgcggtgatgcaaccactccaccatcatactcagatcgcgacggtaagcgttcaacgtattttcagccagatttttttccagccacagagcatcaagaaactgctcgatgcgtgccagatcctgtttcacttgcgccccttatggtcactcatttgatccattatgccttattgtgccgtgactaaagcgattctgatacactagccgcaaaagccacagcagaatcgagaagcttacgttatgaatatgggtcttttttacggttccagcacctgttacaccgaaatggcggcagaaaaaatccgcgatattatcggcccagaactggtgaccttacataacctcaaggacgactccccgaaattaatggagcagtacgatgtgctcattctgggtatcccgacctgggattttggtgaaatccaggaagactgggaagccgtctgggatcagctcgacgacctgaaccttgaaggtaaaattgttgcgctgtatgggcttggcgatcaactgggatacggcgagtggttcctcgatgcgctcggtatgctgcatgacaaactcagcaccaaaggcgtgaagttcgtcggctactggccaacggaaggatatgaatttaccagcccgaaaccggtgattgctgacgggcaactgttcgtgggtctggcgctggatgaaactaaccagtatgaccttagcgacgagcgtattcagagctggtgcgagcaaatcctcaacgaaatggcagagcattacgcctgatctcactgacggcttagcgcatatgctttgccgtcatctttatctttgcgtctcttgttgcaacaaaatccgccgtaaatcccgccattcagcttcgtccatgctgtcggctgccagccataaatgttgccgtttaccgccatcagaacgtaaacgcagcatcatgccgctcttaatcatccacggtgctttgacgatgctccactcctgcccttgccaacgcaaacgcccgtccatcaacaagcgaatttccccctggcgagcattaatacgccgctggctgcgaacgcaatcaaacaccaccaggctaagtaacaccatccataacggggtgtaactgagtggccagggcatgagtaaaataacagcggcaaccagcccatgaatcagcaaggaaagccactgtgcgcgccaggagacgcgcaaatcagattgccacaggaccacgttcccggttccgtgtctggatgagtcggaccatcatttccagttctgcatcggccggtttaccgtgattcatcagccagttaaacaggtccggatcgtcacattccagcagacgaataaagatgcgtttttcgtcatcgcttaagctgtcgtactcatgttcgaaaaacggcatgatactaatatcgagttcgcgcataccacggcggcatgcccaatgaatgcgggctttgttgttaatgtccatcttcttcctgtctcacgaaaatccagtacccggctattgtaacgtgtttttcgccttcttttacgggaatatcagtaaacaccatcgcgatcgcgaaattaattcacaacaattcaatggcttcatttttttggaagtcgcctcgcagaaggcacagatcgcgtagtgaaagcacttgcattgcctcatagctcttttaccattagtcattaatacgccgttaagcaactcaggactctattatggcttttacaccttttcctccccgtcagcctacggcttctgcccgtttaccgctgacgctgatgacgcttgatgactgggcgcttgccaccattactggcgcggacagcgaaaaatatatgcagggtcaggtgacagcagatgtcagccagatggcagaagatcagcacctgctcgccgcccattgcgacgccaaaggtaaaatgtggagcaatttacgtctgttccgcgacggcgatggctttgcatggattgaacggcgcagcgtgcgtgaaccgcagctgactgaactgaaaaaatatgcggtattctctaaagtgaccatcgcgccagacgacgagcgtgtgctgcttggtgttgccggttttcaggcgcgcgccgcgctggcaaatctctttagcgaactgcctagcaaagaaaaacaggtagtcaaagaaggcgcgaccactttgctatggtttgaacacccggcagaacgtttcctgatcgtaaccgatgaagctactgctaatatgctgaccgataaactgcgcggtgaagcggaactgaacaatagccaacagtggctggcattaaacattgaagcgggtttcccggtgattgatgccgccaacagcgggcagtttatcccacaggcgaccaatctccaggcgctgggcggtatcagctttaagaaaggctgttataccggacaagagatggtggcgcgagcaaaattccgtggtgccaataaacgtgcgctctggttgctggcaggtagcgccagccgactgccggaagctggtgaagacttagagctgaaaatgggcgagaactggcgtcgtaccggtacggtactggctgcggtaaaactggaagatggtcaggtcgtggtacaggtcgtcatgaataacgatatggaaccggatagcatcttccgcgtacgcgacgatgcgaatacattgcatatcgagccgctgccgtatagcctcgaagagtaaatctctttatcgcatcaggcatttatcgcctgatgcgacgctggcgcgtcttatcatgtctgggatttgatgcctttatcacaacagggacgaggcccgtagatcggataaggcgttcacgccgaatccggcagttgtgctccgatgcctgatgcgacgctggcgcgtcttatcaggcctacaaaggcatacccattacgcctgcccaatatacaaatagatcgccagaaagtggcacacactaccgccgagcacgaagccgtgccagatggcatggttgtatggaatgcgtttgcagacgtagaaaatcaccccgaggctataaaccacgccgcctaccgccagtaaggtaacgctgcccgccgcgagcttaactgccatttcataaattaccaccaggctcagccagcccatcgccagataggtcaccagagataaaattttgaatcggtgcgcgatggtcagtttaaacagaatacccagcaatgccaggctccagataacaatcatcaacccgcgcgctaacggagaatccagccccaccagcaaaaacggcgtgtaggttccggcaatcaacaggtaaatagcgcaatggtcaaatttcttcagccacatttttgcccgttgatgaggaatggcgtgatagagcgtgctagcgaggaacagcaggatcatactgccgccatagaggctgtagctggttatcgctgtggcgctggcattaagatccaccgcctgaaccagtagcaacaccagcccaacgataccaaacaccaacccaatgccgtgactgacgctgttggctatttcctctgccagactatatccctgcttaatgaggggcttctgaaccataacttactccggagaaacgtacacgcacatgtatacctctccagcgtaactgagaatagttccagtgaacacctgttagctaaaataaattctgatttgagactaatctcctaaaaatcatgaaattaaatgcgaaatttcaactaacaggcgtgagttcaatttaaagacatttaaattcaatcacataaaattgtgtctgaccgggatagatgtcagcaatgacttttttcagttcagtcagggtcatattttcctgctctgcatgtttttcagtcagcgtatccagcgttacggtactggttgcggtgacttcaatcgtgcaaaaataaccgtcatcttcaaaacgtccgacacgaagcacatcacccgttttgaagtggctttcagactcgtcgcggatggtgatggttttacgcccagccagaatgtcatcctggaaacgttgaaaaaaagtgatgtcgtttggctgcatggtactatttcctgtaagaattgactcatctggagcctatgatagtgaaaaaactcaccttaccgaaagatttcttatggggcggcgcagttgccgctcatcaggtcgaaggcggctggaacaaaggcggaaaagggccgagcatttgtgacgttctgaccggtggcgcacacggcgtgccgcgcgaaatcaccaaagaagtcttgccaggaaaatactatccaaaccatgaagccgttgatttttatggtcactataaggaagacatcaagctatttgccgaaatgggcttcaaatgttttcgtacatccattgcctggacgcgcatttttccaaaaggcgatgaagctcagccaaacgaagaagggctgaagttctacgatgatatgttcgatgaactgctgaaatacaacatcgaaccggtgatcaccctctcccactttgaaatgccgctgcatctggtgcagcaatacggtagctggaccaaccgtaaagtggttgatttctttgtacgtttcgcggaagtggtatttgaacgctataagcacaaagtcaaatactggatgaccttcaacgaaattaacaaccagcgtaactggcgtgcaccgctgttcggttactgctgctccggcgtggtgtataccgagcatgaaaacccggaagagacgatgtatcaggtgctgcatcaccagtttgtcgccagcgccctggcggtgaaagctgcgcgtcgcattaacccggagatgaaagtcggctgtatgctggcgatggtgccgctctatccttactcctgtaacccggacgatgtgatgttcgctcaggagagcatgcgcgaacgctacgtctttaccgatgtgcagctacgcggctattacccgtcctatgtgttgaacgagtgggagcgtcgcggatttaacatcaaaatggaagacggcgatctggatgtgctgcgtgaaggcacctgcgattatcttggtttcagctattacatgaccaatgcagtgaaggccgaaggcggcaccggcgatgcgatctctggttttgaaggcagcgtaccaaacccgtatgttaaagcatctgactggggctggcagattgatccagtaggtctgcgctatgcactttgcgaactgtatgagcgttatcagaggccgctgtttattgtcgaaaacggttttggcgcttacgacaaagtggaagaagatggcagcatcaacgacgactaccgcattgactacctgcgcgcccatatcgaagagatgaaaaaagcggtgacttacgatggcgtggatctgatgggctacacaccgtggggctgcatcgactgcgtgagcttcaccaccgggcagtacagcaaacgctacggctttatctatgtgaataaacatgacgacggtactggcgatatgagccgtagtcgtaagaagagctttaactggtacaaagaggtgattgccagcaacggcgagaagctttaagtcgatgaagtaccggatgcaatacttgttgcatccggtcagacaacttccctgttttatttcccgcccgccaaatcgataaaacttcccgtgacgtaagaggctttatcacttagtagccagacaatggcctgcgcgacctcttctgcctgtccaccacgctgcatggggatgttgctcttaacgcgatcgacgcgtccaggctcgccgccgctggcgtgcatttcggtataaataaaccctggccgcacgcagttaacgcggatcccctgcgcggcgacttccaggcttagtccggtggttaacgtatcaatcgcccctttgcttgccgcgtaatcaacatattcccctgggctacccaaccgactggccacgctagagacattgacgatagcgccgccactgccaccatttttaagcgccatgcgttttaccgcctcgcggcagcagagaaaatatcccgtcacgttggtggaaagtactcggttgattcgctctgcggtaaggttttcaacggtgcactgggtaaacaagatcccggcgttattgaccagcgctgctagcggttcatcgtgctgatcgattgctgtaaacatcgcaacgacctggttttcgtcgctgatatccgcctggagcacgaatgctttgccaccggcttgcgttattaagttcatcacttcctgcgccgcgtggaggttttgctgataattaaccgccaccgtatacccttcttgcgccaacagtaatgcagttgcccgcccgatgccgcgactgccaccagtcacaagtgctatagccatttgtttttccgagaaaaattaattcgttgacgtatctttgagattgctaacaaactggctcaatcttcaatgttggcacgcttttccccctcgccctttcagggagagggccggggtgagggtaaatattcgcgccagtgccggcctgttcccctcaccctaaccctctccccaaaggggcgaggggactgtctgagcacttttgtactttgtcatctgactaaaaaggcgccgaagcgcctttagaaaatagtcgaatcagtgaattactggtattcgctaatcggtacgcaggagcagaacaggttacggtcgccgtaaacatcatccagacgtttcactgtcggccagtatttgtctgccacacctgccgggaataccgcaacttcacggctgtacggatgcgcccactcggcgaccagttcgctctgaatgtgcggcgcgttcaccagcgggttatcttccagcggccagacaccggctttcacctggtcaatttctgcgcggatagccagcatcgcgtcgataaagcgatccagttccactttgctttcagattcagtcggttcaaccatcagcgtacccgccaccgggaagctcatcgtcggcgcgtggaaaccgtagtcgatcaggcgcttggcaatatccagctcgctgatgccggtttcttctttcagcgggcgaatatcgagaatacattcgtgcgccacgcgaccgtcgcgaccggtatacagcaccgggaaggcatcctgcaggcggctggcaatatagttggcgttgaggattgccacctggcttgcttttttcagcccttctgcgcccatcatgcggatgtacatccagctgattggcaggatagaggcgctaccgaacggtgccgcagaaaccgcgccctgacgggttaacatgccttcgatttgcaccacgctatgacccggtacaaacggtgccaaatgcgctttcacgccgatcggtcccatacccggaccaccaccgccgtgcggaatgcagaaagttttatgtaggttaaggtgactaacgtccgcaccaataaagcccgggctggtgatgccaacctgggcgttcatgttcgcgccatcaaggtaaacctgaccgccgaactgatgcacgacttcacacacttcacggatcgtttcttcatacacgccgtgggtagaaggataagtcaccatgatacaggagaggttatcgcccgcctgttccgctttcgcgcgcagatcagtcagatcgatgttgccgtttttatcacacgccacaaccaccacctgcattcctgccatatgtgcagaagcggggttagttccgtgcgcagaagccgggatcaggcagatatcgcgatgcccttcgttgcggctttcatgataatgacgaatcgccagcaggcccgcgtattcgccctgtgcgccagagttcggctgcatacaaacggcgtcgtaaccggtcagtttcaccagccagtcagccagctgcgcaatcatctgctgataaccttcggcctgctccggcgggcagaacgggtgcagttcggcaaattccggccaggtgattgggatcatctcggcggcggcgttcagtttcatggtgcaggaacccagcgggatcatcgcctgattcagcgccagatctttacgctccaggctgtgcatatagcgcatcatttcggtttcgctgtggtagcgattaaacaccggatgggtgaggatttcgtcgtcgcgcagcatcgcaggctggatagagcggctgtcgtgagccacgtctttgtccagcgtgtcgatgtccaggccgtggttatcgcccagcagcacgttgaaaagctgcattacgttttcacgcgtggttgtttcatcaagggtgatcccaaccgcgttcagaatatcgctacgcaggttgatttcagccgcttcggcacgcgtcagtacgcccgctttgtcggccacttccacacacaaggtgtcgaaatagtgcgcatggcgcagtttcagacctttttgttgcaggcccgccgccaggatatcggtcagacggtgaatgcggttagcgatacgtttcaggccaaccgggccgtgataaacggcatacaggctggcgatgtttgccagcagtacctgggaagtacaaatgttggagttcgctttctcacggcggatatgttgctcgcgagtctgcatcgccatgcgcagcgcggtattgccagctgcatctttgcttacaccgataatacggcccggcatactgcgtttgtattcatctttcgccgcaaagaatgccgcgtgtgggccaccgtagcccatcggcacgccgaagcgttgcgcgctaccaaaaacaatatccgcgccctgtttacccggcgcagttaacagcaccagcgccataatatcggcggcaacgctgaccacaattttgcgacttttcagttcgctaataagcgcagtgtagtcgtgaatttcaccggtagtgcctacctgctgtaacagcacgccgaagacgtcctgatggtcgagcactttttgcgcgtcatcgacaatcacttcaaaaccaaaggtttcggcacgagtacggaccacatccagcgtttgcggatgcacatcggaagccacgaagaagcggttggcatttttcagtttgctgacgcgtttcgccatcgccattgcttcggcggcagcggtggcctcgtccagaagagaagcagaggccatatccagtccagtcaaatccagcgttacctgctggaagttgagcagtgcttcaaggcggccctgggagacttcaggttgatacggagtgtacgcggtataccagcccggattttccagcatgttacgcaggataaccggcggtagctgcacggcggtgtaacccatgccgatgtaagacgtgaagcgtttattgcgactggcaatagccttgagttctgccagtgcggcgtattcggtcgccggtgcgccaacctgcggtggtgtcgcaagttgaatatctttcggcacaatctggccggtcagcgcgtttaagctttgtgcaccaacggcattcagcatttcttgctgttgcgcggcgtccggtccgatatggcgttcaataaaagcgccgctgttttcaagctggcttaacgtctgtgtcatgagcgatggttcctgaaacgtgcagtgaattgtgaacctctctccttacgaagagagtgagggtgaggcataaattttcctcaccctgatcctctcccgcagaagaggaataaagccgttactcgtcttctaacaatgcttcgtatgcggtcgcatccagcagactttccagttcgctttcatcgctggctttgattttaaagatccagccgcctgcatacggttcgctgttcaccagttccggggaatcgctcagtgcgtcgtttaccgccacgatttcaccgcttactggcgcataaatgtcactcgccgcttttacgctttcggcaaccgcgcagtcatcgcccgcgctaaccgttgcgcccacttccggcaggtcaacaaacaccatatcgcctaacagctcctgagcatgttcggtaataccaacggtgtaagtgccgtcggcttctttacgcagccattcgtgttctttgctgtatttcagttctgctggtacgttgctcatcaatcaatctccaaaaaagtaaatcacgcgacggctttgccgttacgcacaaaaacaggttttgtcactttaaccggcatttcacggttgcgaatttgcacaatcgccgtttcgccaataccttccggcacgcgcgccagcgcaatgctgtaacccagcgtcggggagaaagtaccgctggtgataatgccttcatgctggttgccctgcgcatcggtaaagcgtaccggcagttcattacgcagcacgcctttttcggtcatcaccagaccaaccagtttttctgtaccatgctcacgctgcacttccagggcttcacgaccgataaagtcacgatctgccggttcccaggcgatggtccagcccatgttggcggctaaaggagagatggtttcgtccatctcctgaccataaagattcatgcccgcttccagacgcagcgtgtcacgcgcgcccaagccacatggcttaacacccgcttccaccagcgcacgccagaaatcggccgctttttcattgggcagcgcaatttcatagcccgcttcaccggtataaccagtggtggcaataaacagatcgcccgcctgcacgccaaagaacggtttcatcccttccaccgcctgacgctgggcgtcattaaacagtgtggcagcttttgcctgcgcattcggcccttgcacggcaatcatggaaaggtcatcacgaacggtaatttcgatgccgaaaggttcagcgtgttgggtaatccaggagaggtctttttcgcgggtggcggagttaacaacgaggcggaagaaatcttcagtaaagtagtagacgatgaggtcatctatcacaccgccagaggcattcaacatcccgctgtaaagggctttgccgcttttggtgagcttcgccacatcgttcgccagcagataacgcagaaactcccgggtgcggctgccgcgaagatcgacgatggtcatatgactcacatcaaacattccggcatcggtacgtaccgcatgatgttcgtcgatttggctaccgtaatgcagcggcatcatccagccgtggaaatccaccatgcgagcgccgcaaagcgtgtgttgttcgtacaaaggagtctgttgtgccatcttgtcctcattgaataagcggggctgacaactttttcatggtgaaattatcaccacgaaacccagcatcggagccactcccggtccccaacgcaatcgttctcttttgcctgaacttaccaccgaaacagactgttaaccataaggtaaaattgatcatcacattagcttatggttaaaaaatgcaaaaatcgcgacagaataaaaaaccaaaaaatacaccagtttctatacaaagatgatgtgatgagaaagtcaatttgaataagacaatattaagagctaaaaaaatgtcaaaaaacactaaatcaaaaaataatggcattagaaaatataatgcgaaaacggaggtgaaattagtttatttcaaatgaggaaaatctcccggcgaaaaaaccgggagatgaaagtgtgatgggtatcaaataaacaacagaggagaaatttttaacgcagccattcaggcaaatcgtttaatcccattgcctggcggataagttgcggcttaacgccaggaagcgtgtcggccagtttcaaaccaatatcacgcagcagttttttcgccggattggtaccggaaaacagatcgcggaatccctgcataccagccagcatcaacgccgcactgtgcttgcggctacgctcatagcgacgcagataaatgtactgcccgatgtctttcccctgacgatgcaaccgtttcagttcggcaatcagctctgcagcatccataaagccgagatttaccccctgccccgccagcgggtgaatggtatgtgcggcgtcgcccaccagcgccagacggtggctggcaaactggcgcgcataacgccccgtcagtgggaacacctgacgcgcgctctcaaccttgcataagcccaggcgattatcaaaagcgatatttaacgcgcgattaaattcgtcttcacttgcctgctgcatccgctgcgcttcctctgggctcagactccagacaatgctgcaaagatgcggatcgctaagcggtaaaaaggccagaatgccttcgccatggaaaacctgccgcgccaccgcatcatgcggttcttccgtgcgaatggtcgctaccagcgcgtgatgctgataatcccagaaagtcagcggaatatcggctttgttgcgcaaccaggaattagcgccgtccgcgccaatcaccagacgcgccgttaacatgctgccatctttcagcgtcaggaaggtttcattttctccccaggcgacctgctgtaattctgcgggggctaacagagtgatatcactgctctgatgcgctttgttccacagcgcgtagtgaatcacactattttcaacgatatgcccaagatggctatagcccatgctttgatcgtcaaagctaatgtgaccaaagctgtctttgtcccacacttccataccgtgataacagctggccctacgagagagaatgtcctgccagacgccaagacgggtgagtaatttttcgctggcggcattgatagcgctaacgcgcagttgtggtggtgcattcgccgccagaggttcctgtacgcgctgctccagtacggcaacgcgtaagccgctcccctgtaagccacaggcaaccgccagccccaccatgccgccgccaacaatggctacatcaacactttgcattgtttattccttaaaaccgccttcaacgcgccacccaaccgagggtgcgctgcgccagcacatcgcgtgccggggtgaataattccatcgtcatcagcccgatgttgcgcccgacaaccagcggtgcccaacggttggcaaaaagatgtacaaggctgtccgtgacgccaatggttgcttcgcgatcgctctgtcgacgctgctgataacggcacaatacgccgtaatcccccatgtcttctccgcgctcctgcgcctgagtcagggtttccgcaagactcatcacatctcgcataccgaggttaaacccttgcccggcaatcgggtgcagagtttgcgccgcattgcccaccagcacggtacgatgggtaatagatctggcggcgtgggttaacgccagcggataagcactgcgtttaccagcgtgggtaattttcccaagtcgccagccaaaggcgctctggagttcacggcaaaacttctcgtcactccagctcaacacctcttcgcgccgttccagtggatgacaccagaccaggctacagcgtccgtcagacatcggcaacatcgccagcgggccatgttgcgtaaagcgttcaaaagcgcgcccttcatgcgcaacggaagtagcaacgttggcaatcacggccagttgttcgtaaggctcctgctgccagtcaacgccgcacgcggtggctaacgcactatgggtgccatcagctgctaccagcacgcggcccgtcagcgtctcgccactctccagcgtcacttcaacgtgactctgagtacgggcaacgttagccacgcgatcagggcaatgcagcgttacgccaggtgctttacgcagcaatgcaaacagccgttgcccgacattgtgcaattcgacaacctgtcccagcgccgccagttggtaatcttctgcggcgagggtgacaaatccagcgtgaccacgatcgctgacatgcacggtggtgatggcagttgcgcaatccgccagagattgccagacgccgatgcgcgccagttgctgacaggtacccgccgccagcgctatcgctcgtccatcaaagcccggatgagcatgactctctggcgcagtcgcttcaatcaaatgtaccggcagcgccccgtgacttaaccgggaaatagccagcgccagcgtcgcgcccgccatgccgccaccgacgatgattacgctcattgctttctcgcagcaaccatcaacgcttcgatttcttccggctttttcaccacgctggcggtgaggttttcgttaccggtttcggtaatcacaatgtcgtcttcaatacgaatgccgataccgcgatattgttctggcacttctgcatccggcgcaatatacagccctggttctacggtcagtaccatgcccggttccagaatgcggctgcgatcctgaccataaacacccacgtcatggacatccagtcctaaccagtggctaaggccatgcataaagaaaggacgatgggcgttctgagcgatcagttcatcaacatcacctttcaggatgccgagttttaccaggccgctaaccatgatgcgcaccacttcaccagtgacttccagaatggaagttcccggacgatacaggcgcaggctggtttcgagagactccagcacaatgtcgtagatttcacgctgggcctgggtgaatttgccgttgaccgggaaggtgcgggtaatatcgccagcgtaacctttgtattcacaacccgcgtcaatcaacaccaggtcgccgtcgcgcatttcacactcgttttcggtgtagtgcagaatgcagccgttttcaccgctgccgacaatggtgttataggacggatagcgcgcaccgtggcggttaaattcgtggtgaatttcgccttccagatggtactcgaacattcccggacggcatttttccatcgcccgtgtatgtgccatggcggtgatttctcccgcgcggcggagtacggcaatctcttctgggcttttgaacaggcgcatttcatgaacaacaggacgccagtcgatcatcgttgccggtgcggtgagattttgccggctacctttacgcagtttttccagcgcactgttcacgattacatcagcatatgcatattcgccctgggcatggtaaaccacatccaggccgttaagtagttgataaagttgctgattgatttcgctgaatgccagtgcgcggtcaacgcccagtttctctggcgcggcatcctggcctaagcgacggccaaaccagatctccgccgtcaggtcgcgaacgcggttaaacagaacgctgtggttatgagtgtcatcgcttttaatcagcaccagcaccgcttccggttcgttaaagccggtgaagtaccagaagtcactgttctgacgataggggtattcgctgtcggcgctacgtgttacttctggtgcagcaaaaatcagcgcggcgctgccgggttgcatttgctccaccagggcctgacggcgacgctgaaactcttgccgggatatctcactcataacactctccttacgttttttgtttttagtgtagagtcggtttttgtacttctggcgcggtcggttgcggatgagtaaaggtgtcgtggcataacagcgcggcaacacgaacgtattcgatgatctcttcaaggctcatttcaagctcttcctgatcttcgtcttcgtcgtaacccagttgcgcaatgttacgcagatcgtcgatagcttcaccggtttcgccggtcactttatccagcttcggttgcgtaacgccaagaccaagcaggaagtgattgacccaacctgccaatgcatcagcccgatcgaaaacgctgacatcatcgccatcaggcagataaagctgaaaaaggaagccgtcatcctgcagggcatcgctggtggcagagtgcattttacgcagtgcctgtgccagctcatgaccgaaagccatgccttcgttcgtcaggtcgtgaagtagcggtagccaactgctgtcatcgttaccgccacatatcatcccgctgattaaaccatgcatctcagctggggtcagacccgtcccttgttggttcagatactggttcatttcgttgtaaccaggcatttcgttctgtatagacataagcattcgtcgtcaaagggaggaatattcatgatatgctaccactttgggccctggtggaccagaaaagggcttgtctcttctcatcagggtagctatagtgtcgccccttcgcagaccatgggtctaaagacgaaggcagcgcagtcaatcagcaggaaggtggcatgtctgcacaacccgtcgatatccaaatttttggccgtagtctgcgtgtgaactgcccgcctgaccaaagggatgcgttgaatcaggcagcggacgatctgaaccaacggttgcaagatctgaaagaacgcactagagtcacaaatactgaacagttggtcttcattgccgcattgaatatcagctatgagttagcgcaagaaaaagcaaagactcgtgactacgcggcaagtatggaacagcgtattcggatgctgcagcagaccatagaacaagcgttacttgaacaaggtcgcatcaccgaaaaaactaaccaaaactttgaatgacacttttcggtttactgtggtagagtaaccgtgaagacaaaatttctctgagatgttcgcaagcgggccagtcccctgagccgatatttcataccacaagaatgtggcgctccgcggttggtgagcatgctcggtccgtccgagaagccttaaaactgcgacgacacattcaccttgaaccaagggttcaagggttacagcctgcggcggcatctcggagattcccttcttatctggcaccagccatgacgcaactaccagaactcccactgacattatcccgacaagaaatccgcaaaatgattcggcaacgtcgtcgtgcgttaacgccggaacaacagcaggaaatgggtcaacaagccgctacccggatgatgacttatcccccggtggtgatggcacatacggtcgctgtattcctctcttttgatggcgaactcgacacccagccactcatagaacaactctggcgcgccggtaagcgcgtatatcttccagttttgcatccctttagtgccggtaatttgctgttcctgaattaccatccgcaaagcgaactggtgatgaacaggttgaagatccatgagccaaaattggatgtgcgtgacgtgctacccctttcccgattagacgtgctgatcacaccgctggtcgcctttgatgagtacggtcagcgcctgggaatgggcggtggtttttatgatcggaccttacaaaactggcagcactataaaacgcaaccggtgggttatgcgcatgattgtcagttggtggaaaaactccccgttgaagagtgggatatccctcttcctgcggtggttacaccgagcaaagtctgggagtggtaagggcgatacacccgcatcgccctgattgacatcgttgattctttgacctaatttagtgagtaagggtaagggaggattgctcctcccctgagactgactgttaataagcgctgaaacttatgagtaacagtacaatcagtatgatgacaagtcgcatcataacccttctccttcaagccctcgcttcggtgagggctttaccgttacagccccatgctgccctgccatcgtaaatccccattaaataaacacaacgcattgatctgactttgatttattttctggagcagactcgcaaagtagaatgcgcaacgcggcaacggtgtggagaagggataaaaaaacgggcaagtcagtgacctgcccgttgattttcagagaaggggaattagtacagcagacgggcgcgaatggtacccggaatagctttcattgcctgcagcgctttttcggcaacgtcttcgtcggcttcaatatcaataaccacataacccatctgggcggaagtttgcagatattgcgcggcgatgttgacgccctgctcggcgaagattttgttcagcgcagttagcacgcccggacggttttcgtggatgtgcatcagacgacgcccaccgtgcagtggcaggctgacttccgggaagttcaccgcagagagcgtactgccattgtcagaatacttgatcaatttacccgcaacttccaggccgatattctcctgcgcttcctgagtgctaccgccaatgtgtggcgtcagaaggacgttgtcgaattcacacagcggagaggtaaatggatcgctattggtcgccggttccgtcgggaatacgtcgattgccgcccccgccagatgtttgctcgccagcgcatcacacagcgccggaatatccaccacagtaccgcggctagcattaatcagcaggctgccgggcttcattagactaatttctttcgcgcccatcatatttttggtggacggattctctggtacatgcagactcaccacatcgctcatattcagcaggtcagaaagatgctgtacctgagtggcgttgcccagcggcagtttattttcaatatcataaaagtaaacatacattcccaggctttcagccagaatgcccaattgcgtaccaatatgaccgtagccgatgatacccagctttttgccgcgcgcttcaaaagaacccgccgccagtttgttccacacgccacggtgcgctttagcattggcttccggcacgccgcgcaatagcagcagcagttcgccaatcaccagctccgcaacagagcgcgtattactgaacggtgcgttaaataccgggatcccgcgctttgccgccgcatccagatcaacctggtttgttccgatacagaaacagccaatagcgaccagtttttctgcggcgttgatcacgtcttcagtcagatgggtacgggatcgcaggccgatgaagtgggcatcgcggatggattcttttaattgttcatcatccagcgcgcctttgtgaaattcgatgttggtgtaaccagctgcacgaaggctttccagcgccttttggtgcacgccttctaccagcagaaacttaatcttgtctttctccaggcttacctttgccatttacccaatcctgtcttttgaaatgttgtgtgcggatttgcatccgcctttcaacatatcaaaaaataatattgcggcaatatgaacgtttgcgtcgcgatgttgaggaaatatcacgcaaaggtaattcttggatgaatatgctggtttagaggatttatttagagcaatcgacaattgcctggtaaaagcgtgacacatgtcaccaaatttaatgaagagaatttttttaacgggggaggttcccccgtcagatcatttcacaatggttttgacaccgtcaggtgtgccaatcagcgcaacgtccgcgccacggttagcaaacaagccaacagtcaccacgccaggaatcgcatttatggcgttttccatcgctatcgggtcaaggatttccatgccgtggacgtcgaggatcacgttgccattatcggtcaccacgccctgacggtattccggacgaccgcccagtttcaccagctgacgcgccactgcactacgtgccatcgggataacttctactggcagcgggaatttacccagaatatcaacctgcttggaagcgtctgcaatacagataaatttttctgcaacgctagcaatgattttttcacgggtcagcgccgcgccgccgcctttgatcatttgcatgtggccgttgatttcatctgcgccatcaacgtagatgccaaggctgtcgacttcgttgagatcaaaaacgtgaatgccgaggcttttcagtttttcagtggaagcatcactactggaaacggccccttcaatctggcctttcattgtaccgagcgcgtcaataaagtgtgcggcggtggaacctgtacctacaccaacaatggtgccgggctgaacatactgaagtgccgcccatcctactgcttttttcaattcatcctgcgtcatgatcgtttcgcctgtggtatgaaatttcacacgcattatatacaaaaaaagcgattcagaccccgttggcaagccgcgtggttaactcatccataaaatatcgcgcaatggcaggcatcccctttcgccccgcaaataaagcatacaacggtctgggtatgccgctccacggtgcaaacaggcgcaccagttcaccgttcgcaagcccctgtttacaggcaaattgaggcaataacgccacgccattcaacacaaccagggcgcgaactcgctgagcgaaatgcattagcgcaaatccctgatcttttaagctgcgcttttaaccacggatacaaatgttacccgccgacggcttcggtatatgcaacctgacacaaaattgtgtcatagtgcaggaaaaagcatttaccaggagcagacaacagcaatgaaacgcccggactacagaacattacaggcactggatgcggtgatacgtgaacgaggatttgagcgcgcggcacaaaagctgtgcattacacaaagtgccgtcagtcagcgcattaagcaactggaaaatatgttcgggcagccgctgttggtgcgtaccgtaccgccgcgcccgacggaacaagggcaaaaactgctggcactgctgcgccaggtggagttgctggaagaagagtggctgggcgatgaacaaaccggtagcactccgctgctgcttagtctggcggtcaacgccgacagtctggcgacgtggttgcttcctgcactggctcctgtgttggctgatagccctatccgcctcaacttgcaggtagaagatgaaacccgcactcaggaacgtctgcgccgcggcgaagtggtcggcgcggtgagtattcaacatcaggcgctgccgagttgtcttgtcgataagcttggtgcgctcgactatctgttcgtcagcagtaaaccctttgccgaaaaatatttccctaacggcgtaacgcgtagcgcattactgaaagcgccagtggtcgcgtttgaccatcttgacgatatgcaccaggcctttttgcagcaaaacttcgatctgcctccaggcagcgtgccctgccatatcgttaattctagtgaagcgttcgtacaacttgctcgccagggcaccacctgctgtatgatcccgcacctgcaaatcgagaaagagctggccagcggtgaactgattgacttaacgcctgggctatttcaacgacggatgctctactggcaccgctttgctcctgaaagccgcatgatgcgtaaagtcactgatgcgttactcgattatggtcacaaagtccttcgtcaggattaatccatcaaataatgcctgatagcacatatcaggcgttgtcctcacttctttttgtattccttgaatcacatcacaaaatagacaaatctcaggcggcaaaaaacgacgtctgaatgcattttttttgctggcgacaaacccacgtaaaaagctcaccgtaggcgcaaataccctcattttgattgcgttttacggagcaaataatgtctaacgtgcaggagtggcaacagcttgccaacaaggaattgagccgtcgggagaaaactgtcgacagcctggttcatcaaaccgcggaagggatcgccatcaagccgctgtataccgaagccgatctcgataatctggaggtgacaggtacccttcctggtttgccgccctacgttcgtggcccgcgtgccactatgtataccgcccaaccgtggaccatccgtcagtatgctggttttagtacagcaaaagagtccaacgctttttatcgccgtaacctggccgccgggcaaaaaggtctttccgttgcgtttgaccttgccacccaccgtggctacgactccgataacccgcgcgtggcgggcgacgtcggcaaagcgggcgtcgctatcgacaccgtggaagatatgaaagtcctgttcgaccagatcccgctggataaaatgagcgttagcatgaccatgaatggcgcagtgctaccagtactggcgttttatatcgtcgccgcagaagagcaaggtgttacacctgataaactgaccggcaccattcaaaacgatattctcaaagagtacctctgccgcaacacctatatttacccaccaaaaccgagtatgcgcattatcgccgacatcatcgcctggtgttccggcaacatgccgcgatttaataccatcagtatcagcggttaccacatgggtgaagcgggtgccaactgcgtgcagcaggtagcatttacgctcgctgatgggattgagtacatcaaagcagcaatctctgccggactgaaaattgatgacttcgctcctcgcctgagcttcttcttcggcatcggcatggatctgtttatgaacgtcgccatgttgcgtgcggcacgttatttatggagcgaagcggtcagtggatttggcgcacaggacccgaaaagtctggcgctgcgtacccactgccagaccagtggctggagcctgactgaacaggatccgtataacaacgttatccgcaccaccattgaagcgctggctgcgacgctgggcggtactcagagtctgcataccaacgcctttgacgaagcgcttggtttgcctaccgatttcagtgcacgcattgcccgcaacacccagatcatcatccaggaagaaagtgaactctgccgcaccgtcgatccactggccggatcctattacattgagagcctgaccgatcaaatcgtcaaacaagccagagctattatccaacagatcgacgaagccggtggcatggcgaaagcgatcgaagcaggtctgccaaaacgaatgatcgaagaggccagtgcgcgcgaacagagcctgatcgaccagggcaagcgtgtcatcgttggtgtcaacaagtacaaactggatcacgaagacgaaaccgatgtacttgagatcgacaacgtgatggtgcgtaacgagcaaattgctagcctggaacgcattcgcgccacccgtgatgatgccgccgtaaccgccgcgttgaacgccctgactcacgccgcacagcataacgaaaacctgctggctgccgctgttaatgccgctcgcgttcgcgccaccctgggtgaaatttccgatgcgctggaagtcgctttcgaccgttatctggtgccaagccagtgtgttaccggcgtgattgcgcaaagctatcatcagtctgagaaaagcgcctccgagttcgatgccattgttgcgcaaacggagcagttccttgccgacaatggtcgtcgcccgcgcattctgatcgctaagatgggccaggatggacacgatcgcggcgcgaaagtgatcgccagcgcctattccgatctcggtttcgacgtagatttaagcccgatgttctctacacctgaagagatcgcccgcctggccgtagaaaacgacgttcacgtagtgggcgcatccagtctggctgccggtcataaaacgctgatcccggaactggtcgaagcgctgaaaaaatggggacgcgaagatatctgcgtggtcgcgggtggcgtcattccgccgcaggattacgccttcctgcaagagcgcggcgtggcggcgatttatggtccaggtacacctatgctcgacagtgtgcgcgacgtactgaatctgataagccagcatcatgattaatgaagccacgctggcagaaagtattcgccgcttacgtcagggtgagcgtgccacactcgcccaggccatgacgctggtggaaagccgtcacccgcgtcatcaggcactaagtacgcagctgcttgatgccattatgccgtactgcggtaacaccctgcgactgggcgttaccggcacccccggcgcggggaaaagtacctttcttgaggcctttggcatgttgttgattcgagagggattaaaggtcgcggttattgcggtcgatcccagcagcccggtcactggcggtagcattctcggggataaaacccgcatgaatgacctggcgcgtgccgaagcggcgtttattcgcccggtaccatcctccggtcatctgggcggtgccagtcagcgagcgcgggaattaatgctgttatgcgaagcagcgggttatgacgtagtgattgtcgaaacggttggcgtcgggcagagcgaaacagaagtcgcccgcatggtggactgttttatcagcttgcaaattgccggtggcggcgatgatctgcagggcattaaaaaagggctgatggaagtggctgatctgatcgttatcaacaaagacgatggcgataaccataccaatgtcgccattgcccggcatatgtacgagagtgccctgcatattctgcgacgtaaatacgacgaatggcagccacgggttctgacttgtagcgcactggaaaaacgtggaatcgatgagatctggcacgccatcatcgacttcaaaaccgcgctaactgccagtggtcgtttacaacaagtgcggcaacaacaaagcgtggaatggctgcgtaagcagaccgaagaagaagtactgaatcacctgttcgcgaatgaagatttcgatcgctattaccgccagacgcttttagcggtcaaaaacaatacgctcagtccgcgcaccggcctgcggcagctcagtgaatttatccagacgcaatattttgattaaaggaatttttatgtcttatcagtatgttaacgttgtcactatcaacaaagtggcggtcattgagtttaactatggccgaaaacttaatgccttaagtaaagtctttattgatgatcttatgcaggcgttaagcgatctcaaccggccggaaattcgctgtatcattttgcgcgcaccgagtggatccaaagtcttctccgcaggtcacgatattcacgaactgccgtctggcggtcgcgatccgctctcctatgatgatccattgcgtcaaatcacccgcatgatccaaaaattcccgaaaccgatcattagcatggtggaaggtagtgtttggggtggcgcatttgaaatgatcatgagttccgatctgatcatcgccgccagtaccagtaccttcagtatgacgcctgtaaacctcggcgtcccgtataacctggtcggcattcacaacctgacccgcgacgcgggcttccacattgtcaaagagctgatttttaccgctagcccaatcaccgcccagcgcgcgctggctgtcggcatcctcaaccatgttgtggaagtggaagaactggaagatttcaccttacaaatggcgcaccacatctctgagaaagcgccgttagccattgccgttatcaaagaagagctgcgtgtactgggcgaagcacacaccatgaactccgatgaatttgaacgtattcaggggatgcgccgcgcggtgtatgacagcgaagattaccaggaagggatgaacgctttcctcgaaaaacgtaaacctaatttcgttggtcattaatccctgcgaacgaaggagtaaaaatggaaactcagtggacaaggatgaccgccaatgaagcggcagaaattatccagcataacgacatggtggcatttagcggctttaccccggcgggtagcccgaaagccctacccaccgcgattgcccgcagagctaacgaacagcatgaggccaaaaagccgtatcaaattcgccttctgacgggtgcgagtatcagcgccgccgctgacgatgtactttctgacgccgatgctgtttcctggcgtgcgccatatcaaacaagctccggtttacgtaaaaagatcaatcagggcgcggtgagtttcgttgacctgcatttgagcgaagtggcgcaaatggtcaattacggtttcttcggcgacattgatgttgccgtcattgaagcaagcgcactggcaccggatggtcgagtctggttaaccagcgggatcggtaatgcgccgacctggctgctgcgggcgaagaaagtgatcattgaactcaatcactatcacgatccgcgcgttgcagaactggcggatattgtgattcctggcgcgccaccgcggcgcaatagcgtgagcatcttccatgcaatggatcgcgtcggtacccgctatgtgcaaatcgatccgaaaaagattgtcgccgtcgtggaaaccaacttgcccgacgccggtaatatgctggataagcaaaatcccatgtgccagcagattgccgataacgtggtcacgttcttattgcaggaaatggcgcatgggcgtattccgccggaatttctgccgctgcaaagtggcgtgggcaatatcaataatgcggtaatggcgcgtctgggggaaaacccggtaattcctccgtttatgatgtatagcgaagtgctacaggaaagcgtggtgcatttactggaaaccggcaaaatcagcggggccagcgcctccagcctgacaatcagcgccgattccctgcgcaagatttacgacaatatggattactttgccagccgcattgtgttgcgtccgcaggagatttccaataacccggaaatcatccgtcgtctgggcgtcatcgctctgaacgtcggcctggagtttgatatttacgggcatgccaacagtacacacgtagccggggtcgatctgatgaacggcatcggcggcagcggtgattttgaacgcaacgcgtatctgagcatctttatggccccgagcattgctaaagaaggcaagatcagtaccgtcgtgccaatgtgcagccatgttgatcacagcgaacacagcgtcaaagtgatcatcaccgaacaagggatcgccgatctgcgcggtctttccccgcttcaacgcgcccgcactatcattgataattgtgcacatcctatgtatcgggattatctgcatcgctatctggaaaatgcgcctggcggacatattcaccacgatcttagccacgtcttcgacttacaccgtaatttaattgcaaccggcagcatgctgggttaatgactcgtcccgtcacgatcttcagcaatatgctgaagcatcgtggcggtataacgatgatttctgatactataaagatattcctgcatatacatcggcctgtgcggtgcatcaaaatatttcagcgttgccggattcaccagtcgccaggcaaaatgcgggatcaccgtcagaaaatgtccgcgctccacggcgctgattttggccataaaactgtagggacgataaataatggttggattgatcccacaaggtcgcatattcgcatcaatcattgcttcgaagttggcccggttctgaaagcgcatttgtagccagggcagctcctgaagcagctcttgctcttgtcgctcttcataacggcgagaaacgagaaagcctaatcgcagcggtggtagttcactgatagtcaggttttccagttcctgaactcgtgcagatacatgctgtggggagataataaaatctaactggcggtcaaaaagattatcgataacgccattttcgctgaactcaactggctgggcggtcacgccttcatacttatctccgagactaatcaactgatcgaaaataattgtcggataagtattatctatgccaatcacaatttctcgactacgacgcccactgttatggatttcattatcaatcgcagaaagccgttgataaaccgggaacagtttttgatacagttcctgtccggctttattgaggctgatattattatctttgcgggtaaatagcgtatagccaatttgttcttccagcgcggcaatgcttttaccaaatgggctagccgtcatatggattttttctgccgcccgggcaatattattggtttgcgctaataaaatgaaattgcgcatctttttgctaataaaaatgtccatccccctcccccgcatccttgtccgcttaaccgtttcagtcagcctatccttgatgaaaccgcgagcaaagataggtgattacgtcatggttttacagaaaattacagaaaaaggaggcaatatcgggtaaaggcattagcccgacgaatacgtcgggctacaaatattattgtgctgcaggtgttttagcgggttgttgatccacaggttctaactggaagaccacatcgacctgatcatcaaactgaatagcggcctgctcgtaagtttcctgggcggacaccggcgcggcatcggctttcatcatccgcaccattgggctgggctgatagttggaaacatggtagcgcacgctatataccggccccagtttacgatgaaagccgttcgccagttcctgcgcctgatgaatcgcgttatcaatcgctgccttacgcgctttgtctttataggcatccggctgcgccacgcccaggctcacagaacgaatttcgttaagacccgccttcagcgcgccatccagcaaggaattcagtttgtctaactgacggagcgtgacttccaccgttctcacagcgcggtagcctttaaggatacttttaccatcctgataatcataatctggctgggtgcgtaagttcgcactgctgatatcttttttcgcgatctgattgagttcaaggaaggaaatgtattgtgcgacgcgctcatctgcctgtttcttggcagtagcggcatccttcgcggccacgttaacttcaatcgcaagagtggcaatgtctggcaccgcatccacgcttgccgtaccggaggtgacaatatgcggtccatccggcaattcgttagcctgcgctgccatcccgctaatacccattaatgccgccagggcgataactttgaacttcacgttagtctctccgtgttaattgacttgcccaaaattcaggacctctggaggcaagcttagcgcctctgttttatttttccatcagatagcgcttaactgaacaaggcttgtgcatgagcaataccgtctctcgccagctgcaaggcaataaaccacataacacatcccacaaccagattgataatgcgctgtgcttttgccgtgcgcagacgcggtgccagccaggctgcgagaagagccagaccaaagaaccacaggaaagaggcgctaattgtcccgagtgcaaaccagcgttttggttccacatcaagttgcccgccaaggctgcccagtacaacaaaagtatccaggtaaacatgcggattcagccaggtcactgccaacatggtggcgataattttccatctgccttgcttcatgacttcggcgctggctaactcaatattactgctcattgctgttttaaaagcgccaaaaccataccacagcaagaaggctacgccgccccaggtgaccagcgccagcaaccacgggctctgcatcaataacgcgctgccaccaaaaatcccggcgcaaatcaggaccaaatcgctgatagcacaaagtaaggcaatcataatgtggtactgacgacgtatgccctgattcatcacaaaagcattttgtggaccgagcggtaggatcatagccgccccaagtgcaagaccttgaaagtaataagaaaacacgttggatattccgaattaagtatctgatgcagagactatatcgcgggattgttattagcggaaattgataatattaattggcaatcagaaaaactaataagagagaggccagagagtattatctggcctcagcgttgattacgcagctttgtcttctttcacccgcttaaagttcacatccatttgcgggtacgggaagctgataccggcggcatcaaattcacgtttaatacgctccagcacatcccagtacacgttttgcagatcgccgctgttgctccagacgcggaccacgaaattaatgctgcttgcaccaagttcgttcaggcgcacagtcatttcgcgatctttcaaaatgcgatcttcagactggataatattggtcaggatctgcttaacctgatcgatatcggaatcatacgccacgccaataataaattcgttacggcgaactggctcgcgggagaagttaataatatttccggcaataattttaccgttcggaataacgataattttaccgtctgcagtacgcatggtggtggagaaaatctgcacactcagcacagtaccggctacgccgcccaggtcaacatattctccggcacggaacgggcggaacatgacaagtaacacgccagcggccaggttagacagactcccctgcaaagccagaccaacagctaagcctgcggcaccgagtacagcaatgacactcgcggtttgtacacccacgcgtcccagtgcagcgattagcgtaaaggcgataataccgtaacggactaatgcagaaagaaaatcagcaacagtggcatcgattttacgggagatcatcaggcgattcaccgcgttggaaatcatccgcgcgataatcaaaccaacgatgatgatcgcgagtgccgccacgatgtttactgcataacttagcagcagcgcctggttagctaccagccagcttcccgcgccgtttatgctatcgacaacattcaaatcttccattcaatattccttttcaactgactcaaaatggagaaatacactccgccgccttatgacgggcagtctgacaagggtaaacaataaagcataattttgccaaatagatcacagatttctcatctgaatcaccttgcttttggcgaaaaaatccccgcagagcggggctcagacagatatcaatgtgcgctttgtcatgccggatgcggcgtgaacgccttatccggcctacaaaaacctgcaaattcaatatattgcaggatacgtgtaggcctgataagcgtagcgcatcaggcaattttgcttttggcgaaaaaaagacccgcagagcgggccttgagataagcagaaaggaatatcttacagaacgtcgatcgcgttcagttcctggaatgctttctccagacgagcgatcatgctagtctgaccggcacgcagccatacgcgcggatcgtagtatttcttgttcggctgatcttcgcctttcgggttacccagctgaccctgcagataagcttcgttcgctttgtagtagttcagaacgccttcccaggttgcccattgggtatcggtatcgatgttcatttttactacgccgtagcttacggagtctttgatttcctgagcagtagaaccggaaccaccgtggaatacgaagttcaggctgttgtgcggcaggttgtgtttcttggaaacatattcctgagaatcacgcaggatggtcggagtcagaaccacgttacccggcttgtaaacaccgtgtacgttaccgaaggacgctgcgatggtgaaacgcgggctgattttgctcagttcggtgtatgcgtaatcaacgtcttccggctgggtgtacagtgcagaagcgtccatgtggctgttgtccacgccgtcttcttcaccaccggtgcaacccagttcgatttccagagtcatgccgattttggacatgcgctccaggtatttagagcagatttcgatgttctcttgcagagattcttcagacaggtcgatcatgtgagaagagaacagcggcttaccggtagctgcgaagtgtttttcacccgcgtccaacagaccgtcgatccacggcagcagtttcttcgcgcagtggtcagtgtgcaggataaccggaacaccataatgttcagccatctggtgaacgtgatgcgcaccagagatcgcgcccaggatagcagcaccctgcggaacgtcagatttcacgcctttaccagcgataaaggaagcaccaccgttggagaactgaacgataaccggcgctttaactttagcagcggtttccagtacggcgttgatggagtcagtaccgacgcagtttactgctggcagtgcgaagttgttttcttttgctacctggaaaactttctgtacgtcatcaccagtgattacgccaggttttacgaaatcaaaaatcttagacatgtctcttgtcctgtatcgtcgggccttatactcgtcatacttcaagttgcatgtgctgcgtctgcgttcgctcaccccagtcacttacttatgtaagctcctggggattcactctcttgtcgccttcctgcaactcgaattatttagagtatgaaaaattgcgtgctctaaaagcgcgctgaaacaagggcaggtttccctgccctgtgattttttacttcttagcgcgctcttcgagcatcgctactgcaggcagtactttaccttccacgaattcgaggaatgcgccgccgccagtggagatgtaggagattttgtcagcaatgccgaacaggtcgattgctgccagagtgtcgccgccgccagcgatggagaacgcttcgctgtctgcgatagcgttagccacgatttcagtacctttgcggaagttcgggaattcgaacacgccaaccggaccgttccacagaatggttttcgcattcttcaggatttcagccagttcctgagcggaagcatcaccgatatccaggatctgctcgtcagctttcacatcgttaacagatttcagggtagccggtgcagtttcagagaactcggttgctacgcgaacatcagacggaaccgggatgttgcaggtggtcagcagacgtttagcttcgtcaaccaggtcagcttcgtacagggatttacccacatcgtggccttgtgccgcgataaaggtgttagcgataccaccaccaacaatcagctggtcagcgattttagacagggagtccagaacggtcagtttggtagatactttagaaccaccaacgatagccaccatcgggcgagcaggttctttcagtgctttacccagcgcgtccagttcagctgccagcagcgggcctgcgcacgcaacgtcagcgaatttaccgataccgtgagtagaagcctgcgcgcggtgagcagtaccgaatgcgtccattacgaacacgtcacacagtgcagcgtattttttggacagggtttcgtcgtctttcttctcgcctttgttgaagcgaacgttttccagaacaaccagttcaccttcagcaacgtcaacgccgtcgaggtaatctttaaccagacgaaccgggttagacagtttgtctttcaggtagttaacaaccggcagcagagagaattcttcgttgtactcgccttcggtaggacgacccaggtgggaagttaccatcacttttgcgccttgtttcagggccagttcgatggtcggcagagaagcacggatacgcgcgtcgctggttactttcccgtcttttactggtacgttcagatccgcacggataaatacacgtttcccagcaagatccagatcggtcatcttaattacagacatggtgaatcctctcgttgattctaaaagttttgcagacgctgcttgcgtcttacctgaaagcaacagtagccatagctaacgtcgtgtcgagcattcggttagcaaagccccattcgttatcgcaccagaccaacgttttgatcaggtgtgcgccactgacccgggtttgggtgccatcgacaatggcactgtgcggatcgtggttaaaatctacagagaccaacggcaattccgtatagtcaactataccatgaaatgcaccttgtgctgctttttgcagcaacaggttgacttcattggcttttacaggtttcttcaccgtcacgcttaaatcgattgccgtcacatttatggttggcacacgtaccgcaatcgcttcaaagcgatcgttaaattgcggaaaaaatcgtgtgataccggcggccagtttagtatcgaccggaatgatgctctggctggctgcccgggtgcgacgcaggtcaggatggtatgcatcaataacctgttgatcgtgcatggcggagtgaattgtggtcacagtgccggactcaataccgtacgcatcatctaacaatttgatgacgggaattatgcaattcgtggtacaggaagcgttagaaacgatgcggtgttccgcacgaagttgatcctgattgacgccgtaaacaacggtcgcgtcgagatcgttactgccaggatgactaaagagcacttttttggccccggcggcaatatgcgcttcgccatgctcgcgggagccatatacgccggtgcagtcgaggactacatcaacgccaagttcacgccaggggaggctttgcagactacgttcatgcaatacgcggatggcgtcatcaccaacaaaaagttgatcgcgttcctgtcgtacttcccatgcaaaacggccatggctggtgtcatatttcaacaaatgcgccatgcccgcagcatccgccagttcgttgattgccaccacggtaatttccgcccggcgtccggattcatacaaagcacgaaccacattacgcccgatgcgaccgaagccatttatcgctacgcgtacggtcatagatctcctgcaaggttttccctgagcaaatttgccagacagagtaatccagcaaatcgtccggggaaaccttacctgtcgcaaactgcgactgattggttaattgtcgaacatttaatcgactgaaacgcttcagctaggataagcgaaacgtggaataaaaggaatgtttgtccagccgaagaagacatttatctgactcacatcacacttttatccccttttgtgggaagctttattccaggctggcgtaataataaccctacaataactggaataaattgtcagcttgtgaagtgataccggccttcttcagtcatctctactatcagattggcctgacggctattcatcagcacacgctcgacattggggccatcggtgcgggcataaaatgcttcggctacttgccgcgttaatcctcccgcaattttacgactaatcaagcgctcccgcagaatttgagcaggtgcatgaataaaaatagaaaaatcgcagaaagatgccaactccagccacttttcatcatccagtaacaaccagtttccttcgacgatgacgagtggtgcggtaacgtgcaacgcatcttcaacaggatcatgcttttgtcgatcgtactgcggccacgtacaatccccttccacgacctggcgcagattttccgtcagtttcgcaacgtcaaatgtctctggtgcgcctttgaaggggcgcaattgatgcgcatccagccagctattgtaatggtgaaaaccatccatcgggagcgtctgaatagcgggcagttccgggtcttgttgcgcgagatattcccagaaggtggttagggtacttttacccgtccccggcggagcgcaaagaaaaaccaccgtacgccgctgcggatttaccgtctgtaaggccgccaacatgtgcagcaacggtttatgtacattttcaatctcttcgttctggtactgtgcctgtatcttcagcccattcaccgttaattcaattttcacggcgttaattcctttaaggtggtcgttactgccagcgtcagcgccgttttgaccattccgctaaaacgcgcctcactccagacggagaaatcagcgaacttcatcgcttttaacgcgtcatagagcatcgcattgcgggttatgctattgacgttgctgataaaatcccaggtcatgtcatcggcaaatccgggcgtttcatcctgttcgttcaggtaatgccagaactgggaaaaatgcgtgatatcggcgtacaaccatttatccattttcccaacgcataaatcaaacgcagtgcaacatcaatatcgtcaagcgggccgctttgggcgagtaacggcttcactgcatattccacgatctcttcatcgttatcgacaaacaggctcggcagaaactggcgtatcccctggagcaaaatggtatgcgcagttttcataaaactaaataaattgtcctgtgcatccagttgctcaagcacatcatcttctgtcagcgtcgccattggtcttccgatagatcaccatcaatgcagggagtctattatattacacgtttggtccgcgccgccgatcagtaatgtctgcgtccgcaccccattcgccgtctgttggataccgttcaccagctcaccgcccgtcacgcccgtagcgctaaagaggatatcgttccccctcaccagttcatcgaggctgtacacacggttaacgtcaacgcccattgccttgcaacgcttgcgctcctgctctgcaatctgccgattttccgtgtaatcccctttagcctggcaaaagtcaatcagctcggcctgcatatccccgcctaatgctttaacggcacaggcagaaatcacgccttctggcgcaccgccgatggtgtacatcacatcgtaaggattatcctgccagcaggtcagcacgctggcggcgacatcgccatccggcagggcaaaaaccttcacgcccagctgtgttgcttcctcaatcgcggcactcaggcgcggtttatccagcgtaaccatgcgcagcttatccagcggtttgcctaacgctttcgccacgttgcgcaggttgtccgtcagaggcaaagacagatcaatcgcgcccgccgccagccgattaacaaccagctttttcatatacatatcgggcgcatgtaacaggctatctcgaggggcgaaagccatgaccgccagcgcattgctctgccccatcgccaccatccgcgtgccttcaatgggatcaaccgcgatatcgacttctggcccatcgcctttgcccacctcttcgccaatccacagcatcggcgcatggtcaatttctccttcgccgataaccactcgtccacgaaaagcgacgtcgtttaatgcctggcgcatcgcggtgaccgccaggccatcaattttatttttgtcgccacatccggtttgcggccaggcagccaacgctgcctgttccgtaacgcgaaataatggccacgccagggacatcattgcgcggcctccccgatatcaacgccaaattgtgccagcagatatttctcggcctgttcattccagatgccgtgcgtttcctcaaccagccgcgccaactctttaaacagcggatcggttttgcctttttcggcaaaatcggcaatggcagtgagcggcatggtcacgccgttataaatgagttttttaccgccagggatatccggcagattgagcacggtttctggcaccgcatccaggccaccgatatgggtcaccataaagctcggctgtaactgcccagtggcgctaagggcaatcgcctctttcatgtcgtccgtactaccgccagatgtaccgacgacgtgcgtgctgttgtaatggacgttgtagaaattaaacggcactttgaagtttttatccgtcggcccggcaaagaagttcagacagccatcttccgccagtaattcatcagccatctcaacgacagcaggcaccgccgcataaacaaaaatgtcatcgaacccggcatctcctgtcagcgcccgcagcatctggacaggatcgctcatccctttggtattcacatacaccagctcaatgcctttactggccgccagttccaccggcagcagcttctgtacctgcgccagacgtttgtcgtcgatatcgaccaccaccacccggctcggttgtatgccgccgttaatggcgtaatcgatagcgccaatgcccatcggacctgcacacgccagcagtgcaatattgccgccaggtttgacgcccatgcgatgctcataaacatattgcgtggtgtgataattggcatgataagcaccaataatgcagcacataggctctgccaggctcgccgcagcaaaataagagccgtgatacggtaatacgcagcccaaattaatggcgatttcgggaataatcatataagtggcattgccgccaaaatattcgtagctgtagcccgcactatatccgcttggtaaccccatcgccggttgcaatacaaaacgctggccttttttatatttgccagtgagatttttacccacttcgacaataaccccggcacattcatgcccggtaatgaccggatgattttctaaatcgtcgggtacgcgtttatgttcactaccgagtaacgccgctttccaggtgcttaaacagacgctgtcagaaattacactcaccagtaattcattatcggtaatttctggcagttcaaatacgcgcagacggacatcccgcttgccataaatagcagcaactttggttttcatttttacctctgtaatcagtgtttatgttcggcggttaattgattaaataaagtgtcgagttttggatcgccaatatagttattaatcaatatcagtggtttatccgtcacacgtttcacgcgcccttccagactggcatgagtaacgacgatatccgcatccgcaggcacgttttctatggcgtaatgttttacttcaattgccagccccgctttttccaggcgtttacggaaggtggtcgcgcccatcgcactggagcccatccccgcatcgcaaacaaaggcgatacgcttaaccctgcttaagctgaatgcaccctcttgtttcatcgccttaaccgcattggcactctgagcaaactcatcttcgctctccgtttccaccgttttttccatcttcagtatcaggctagtaatagcaaaggacaccagggtacctaccgtaacaccggcaattgtcgccaggaagctgcctttcggcgtcagtgccaggtaagcaaagatagaccccggacttgggccagccaccagaccaccgtccagtaagttaaacatccaggtgccagacataccgcccgcaatcatggcaataatggtcagcggcttcatcagcacatacgggaaatacagttcgtggatcccaccgaggaagtgaataatcatcgccccgggcgcagaacgtttactcatccctttaccaaacaaggtaaacgccagcagcagccccaggcccggacctgggttagaggccaccataaagaagatggatttaccgttaacgctagcctgttgcattcccagcggataatagacgccctgatcgatcgcattattgaggaaaagcactttcgccggttcattgatgacactcaacaatggcagataacccgcatgtaccagcgcctcaatacactctttgacgaaagtattggcaattaacaccgccgggccgataacttcaaaacccagcagacaaaggagcatccccgcgatacctaaactgaagttattgataaccatctcaaaaccggcaggtatgcgtttttccagtgccttatcgacatattttatgaccaacccaccgagcggccccatgatcatactgccaaggaacatcgggatctctgcgccaacgatcacaccaatagtacctattccgcccatgaccgccccgcgtttaccgccgaccagatgaccacctgtagaaccaatcatcacgggcaataaataggtaatcatcgggccgacaattttggcgaaatgttcgttaggcagccaaccggtgggaataaataacgcagtaataaaaccccaggcaataaaagcaccaatattggggatgaccattgcagtcaaaaagcccccaaaagcctggacctttgcacgagcagacttgttttccataatattatcctgtagaggagagagtaattatccgcggctgataatgtccgctaattgtttttcactacttgctgttaagagttgttcgagtatttcttcttcgcacagtaattcacttaacgcctgaatagcgccaatgtggctatcggcatcggcagcagagagtccgatgagtaatttaattggttcgtcattccccggaaaataaacaccttgttcaagtaatgtcaaagacatcccggttttaagcgccccacattccggtcgcgcatgaggcattgccacgcctggtgcgagaatataataagggccattgttaatggtggaatctttaattgcctgaatgtaattctcgctgatatagtttttatccagcaaacttaccatgctgaaatcgatagcttcctgccaatcttttgcactatgtataacactgatactactttctggaaaataatcactaagccgcataaattatccttattttatttttagggtaccgtccggcggtaaaaataaaatactcgtgcggtttaatgaaagcaattgagcagggaaaccggtgttttgaaaacagtgaattattaatttcttatataacattgagttatagatataacaacaaatgtcaatacgcatatcgtgatgcatattacataattgatatttattgcatataaatatttgtgatctacaacacgccttatctattgcttgtccgcaaacggacatatcaaggtaataaaaaaggtcgccgaagcgacctttttacccgaaatgctaattacagcagttcttttgctttcgcaacaacgttatcaacagtgaagccgaactcttcaaacagcagctctgccggagcagattcaccgaaggtggtcataccgacgatagcaccgttcaggccaacatacttgtaccagtagtcagcaatacccgcttctacagcaacgcgtgcagtaaccgctttcggcagtacggattcacggtaagcagcatcctgcttgtcaaatgcgtcggtagacggcatggacaccacgcgcgctttcacgccttcggcagtcagtttttcgtaggcagcaacagccagttcaacttcactaccggtagcgatgaaaatcagttccggctgaccggcgcagtctttcagcacataaccaccgcgcgcgatgtttgccagttgctcttcagttcgttcctgctgcgccaggttctgacgggagaggatcagtgcggtcgggccgtcctgacgctcaacaccgtatttccacgcgaccgcggattcaacctggtcacacggacgccatgtagacatgttcggggttacgcgcagagaagcgacctgctcaaccggctggtgagtcgggccgtcttcgcccagaccgatggagtcgtgggtgtaaaccatcacctgacgctgtctcatcagcgcagccatacgtacggcgttacgtgcgtattccacgaacatcaggaaggtggaggtgtacggcaggaagccaccgtgcagggagataccgttagcaatcgcggtcataccgaactcgcgaacaccgtagtggatgtagttacccgcagcatcttcgttgattgctttagaaccagaccacagggtcaggttagacggcgccaggtcagcagaaccgccgaggaattccggcaacagcggaccgaacgcttcgatagcattctgagacgctttacggctggcgattttcgccggattagcctgcagtttagcgatgaactctttcgctttagcgtcgaagtcagacggcatttcgcctttcatacggcgggtaaattcagcggcttcctgcggataagctttcgcgtaagcagcgaatttctcgttccatgcggattctttcgcctggcctgcttctttcgcatcccactgagcatagatttcagacgggatttcgaacggcgcatatttccagcccagttgttcgcgggtcagggcaatttcagcgtcgcccagcggcgcaccgtgggagtcgtgggtaccggctttgttcggggaaccgaaaccgatgatggttttgcacatcagcagggaaggtttgtcagtcactgcgcgcgcttcttctactgcgcgtttgatagatgccgcgtcatgaccgtcgatgtcgcgaataacgtgccagccgtaagcttcgaaacgcattgcggtgtcgtcggtgaaccagccttcaacgtgaccatcgatagaaataccgttgtcatcgtagaatgcaatcagtttacccagcttcagcgtacccgccagagagcaaacttcgtgggagatgccttccatcatgcagccgtcgcccatgaaggcgtaggtgtagtggtcgacaatgtcgtggcccggacggttaaactgcgccgccagcgttttttctgcaatcgccataccgactgcgttggcaataccctgacccagcggaccggtggtggtttccacaccagcggtgtaacccacttccgggtgacccggagttttagagtgcagctgacggaagtttttcagttcttccatcggcagatcgtaaccggtgaggtgcagcaggctgtagatcagcatggagccgtggccgttggacagcacgaagcggtcacggtcagcccaggacggattctgcgggttgtgtttcaggaaatcacgccacaggacttcggcaatgtcagccatacccataggggcacccgggtgaccggatttggctttctgtactgcgtccatgctcagcgcacgaatagcattggcaagctctttacgactggacattttgactccagatcggatgatgaagggcacgcccttaacgacttgacgacagcgcgttttgggctacgccggaaaatttgccaacaatttaccacaagccgcgcgtcatgtacatggaacatccttttgccgcttcagaaatctctggatcatgctcgcatgttgcgcaatctactcgcccgtccgctgcgcttttccttatactgagactgagcgtcgattcacctgcaaacggcgcatttttagaataatcctgaccttgtgcggaagagaaaacatgaaaattcgcgccttattggtagcaatgagcgtggcaacggtactgactggttgccagaatatggactccaacggactgctcagtagtggagcggaagcttttcaggcttacagtttgagtgatgcgcaggtgaaaaccctgagcgatcaggcatgtcaggagatggacagcaaggcgacgattgcgccagccaatagcgaatacgctaaacgtctgacaactattgccaatgcgctaggcaacaatatcaacggtcagccggtaaattacaaagtgtatatggcgaaggatgtgaacgcctttgcaatggctaacggctgtatccgcgtctatagcgggctgatggatatgatgacggataacgaagtcgaagcggtgatcggtcacgaaatggggcacgtggcgttaggccatgtgaaaaaaggaatgcaggtggcacttggtacaaatgccgtgcgagtagctgcggcctctgcgggcgggattgtcggaagtttatctcaaagtcaacttggtaatctgggcgagaaattagtcaatagccaattctcccagcgccaggaagcagaagccgatgattattcttacgatcttctgcgccaacgcggcatcagcccggcaggtcttgccaccagctttgaaaaactggcaaaactggaagaaggtcgccaaagcagtatgtttgacgaccatcctgcatccgccgaacgcgcccagcatattcgcgatcgcatgagcgcggatgggattaagtaaagcctggtggtgtcgaacgtaggtcagataaggcgttcacgccgcatctgacatgaatggcacatttgttaccttgtgcgcattgccggatgcgatgctggcgcatcttatccggcctacgggtgccgaacgtaggtcggataaggcgttcacgccgcatccgacattaatggcacgttttacccgtgcgcatcgcatctggtgcttactcgccctttttcgccgcctgaatatacagcatttccagcgccagcgttgccgctgccagagcagtgatttcgctctgatcgtatgccggagccacttccactacgtccatcccaacaatgttgagatctttcaggccgcgtaccagtttaatagcgcgatcggaggtcaggccgccaatcactggcgtaccggtgcctggtgcaaaagcaggatccaggcagtcgatatcaaaagtcaggtaaaccggcatatcacccacaatctgtttcacttgggcgataacgtcatccacgctgcgatcgttcacctggcaggcgtccagcacggtaaagccgttgtctttatcaaactcggtacgaataccaatctgcacggaatgattcgggtcgatcagaccttctttcggcgcggtatagaacatagtgccgtggtcaaattcacaaccgttcgcataggtatcggtgtgggcgtcaaagtgtaccagcgccattttgccgaaatgcttcgcatgagcacgcagcagcggcagcgtaacaaagtggtcaccaccgaaagagagcatacgcttaccggcagccagcagcttctcggcgtgcgcctgcagcttttcgctcatctcacgggcatcgccaaaggcatataccagatcgccgcagtccacgacgttcagacgctcacgcatgtcgaaattccacgggaagcggttgtgttcccaggccagattcgtgctaacctgacggatcgctgccggaccgtggcgaccacccgcacgaccagaagtggccatatcgaacggcacgccagtaatcacccagtctgcatcgctgtcatacggctggaagttcatcggcaggcgtaaaaaaccaaaggcattggaaaccagactgttatcgtattgatgacctaaggtgctcatggatggactcctattacaaagtcgatataaaaaaacccttccgcgtcgttaggcccgacgaggaagggttggatttgtcacaataaattgtggcggattatcaccgctaaattaagcggattcaagtaacacaggacttactcatcttcaagataagtataaccgtacaaacctgcctcgaactcttcaaggaactgttgttgcagttcagcatcaagatcggttttcttcacttgatcgcggaactgggttaacagcgttttcggatcgagctgtacatattgcagcatgtccgccacggtatcgccttcgtcagacagttctacttctacgctaccgtcagggaagacgaacacgtcaaccgcttcggtatcaccgaacaggttgtgcatgttgccgaggatctcctgatatgcgccgaccataaagaaaccgagcatcggcggattctctggatcgtactccggcattggcattgtcgtggcaataccgtcaccatcaatatagtggtcgatagcaccgtcagagtcacaggtaatatccagcagcacagcgcgacgttccggcacttgatccagcccttccagcggcagaaccgggaacaactggtcgatcccccatgcgtccggcatgctctggaacaggctgaagttgacgtacattttgtccgccatacgttcctgcagctcgtcgataatcggacgatgagcacggttttgcggatccagctgcttttgcacttcatggcacatgctcaaataaagctgctcagcccatgcacgttcttgcaggctaaagatgccggaagagtagccgatatgaatgtcgtgcagatccatctgactgtcgtgtaaccattcacgcagagaacggcgagttcccggttcgtgcatctcctgccaggtttcccacatgctttgcagcgcgcgcggcgcatcttctgcaggcgcggtcggcaccgtgtattcgttacgttccacgccgatgatattagacaccagcacggtgtgatgcgcagtcaccgcacgaccgctttcggtgattaccgtcggatgcggcagaccgttttcttcacacgcatcgccaatcgcccagataatgttgttggcgtattcattgaggccgtagttcacgctacagtcggactggctacgagtaccttcataatccacgcccagaccgccgccgacgtcgaagcactgaatattgacgcccagcttgtgcagttccacatagaaacgcgcggattcacgaacgcctgtcgcgatatcgcgaatattcgccatctggctaccgaggtggaagtgcagtagttgcaggctgtcgagacgcccggcttcacgcagggtttcaaccagttgcagtacctgagtcgcagccaggccgaacttgcttttttccccgccggaggactgccatttaccgctaccctggctagccagacgtgcacgcacgcccagacgaggaacgacattcagacgttctgcttcatccagcacaatggcgatttcactcatcttctcaatgaccagatagaccttgtgccccatcttctcgccaattaatgccaggcggatatattcgcggtctttataaccgttgcagacgatgacgctacgggtcatgccagcatgtgccagtactgccatcaactcggctttggaaccggcttccagacccagcggttcgccgctatgaatcagggactcaatcacgcggcggtgctggttaactttgatcggataaacaaggaagtaatcgccgttatagccgtaggattccctcgcacgtttgaacgcggcgttaatggaacgcaaacggtgctgcaggatctgtgggaaacagaacagtgcaggcagacgctggccctgtgcttcacgagttttcactaactgcgcgagatcgacgcgagcttccgggacgtccgggtccgggcacacgctaatgtggcccagctcgttaacgtcatagtagttattgccccaccaggcaatattgtaagtacgcagcatcttgctggcttcctgggagctcattgcaacctcctgcatggagcgtagtacaccgtgttcgcccgcactgctaggcaaacccatagacatgtcgtcagacatagcgaacctcaaattattttattaagtgtaaaacagttaacgactatcgcagcctggaactggcttaacaacccataagcacatggattttccagcagactatgctgacgctccaactgcgcaaccggtttctttttcataacattattaagcacataaccgaacgtaagtgtgaaagttcggcgaaaccacgagaaaactcttgtttttacaagagcgcccttgttcagtcctcagtaactgtaaccagctcttgaatcctgagaagcgccgagatgggtatagcaagcgcaggtatgcaaagcagagatgcagagtgcggggaacgaatcttcaccagaacggtgagacaggttaagcagcagacaacggttcattatttcgtaagtcctccacggccgcctgttaagacgaacccacaagccaaaactctgattagtacccggctggaagtggcaacacgaaagaaacgtcgtgtgctttttatttaagccgcgcgccgcgttttataccccacaatggcagaaaattgcaaaagataaatacgcagaatgccggcattgtcaggaaaaatttccagccacgtttttaacagaatgagacagctttcaaaaaaaagtggaaatagggtgaagaattgacctaaaatagccatccagatgttaatccatccataccgattaacactcagactgccagtgtttttaacctgcagagtcgtggtaggatccgctaccacagaaaatccacacaacagtttgagctaaccaaattctctttaggtgatattaaatatggcaaaacacctttttacgtccgagtccgtctctgaagggcatcctgacaaaattgctgaccaaatttctgatgccgttttagacgcgatcctcgaacaggatccgaaagcacgcgttgcttgcgaaacctacgtaaaaaccggcatggttttagttggcggcgaaatcaccaccagcgcctgggtagacatcgaagagatcacccgtaacaccgttcgcgaaattggctatgtgcattccgacatgggctttgacgctaactcctgtgcggttctgagcgctatcggcaaacagtctcctgacatcaaccagggcgttgaccgtgccgatccgctggaacagggcgcgggtgaccagggtctgatgtttggctacgcaactaatgaaaccgacgtgctgatgccagcacctatcacctatgcacaccgtctggtacagcgtcaggctgaagtgcgtaaaaacggcactctgccgtggctgcgcccggacgcgaaaagccaggtgacttttcagtatgacgacggcaaaatcgttggtatcgatgctgtcgtgctttccactcagcactctgaagagatcgaccagaaaagcctgcaagaagcggtaatggaagagatcatcaagccaattctgcccgctgaatggctgacttctgccaccaaattcttcatcaacccgaccggtcgtttcgttatcggtggcccaatgggtgactgcggtctgactggtcgtaaaattatcgttgatacctacggcggcatggcgcgtcacggtggcggtgcattctctggtaaagatccaagtaaagtggaccgttccgcagcctacgcagcacgttatgtcgcgaaaaacatcgttgctgctggcctggccgatcgttgtgaaattcaggtttcctacgcaatcggcgtggctgaaccgacctccatcatggtagaaactttcggtactgagaaagtgccttctgaacaactgaccctgctggtacgtgagttcttcgacctgcgcccatacggtctgattcagatgctggatctgctgcacccgatctacaaagaaaccgcagcatacggtcactttggtcgtgaacatttcccgtgggaaaaaaccgacaaagcgcagctgctgcgcgatgctgccggtctgaagtaatctttcttcacctgcgttcaaaggccagcctcgcgctggcctttttcttttggataggcgttcacgccgcatccggcaaaaaaaccgcccgcacaataacatcattcttcctgatcacgtttcaccgcagattatcatcacaactgaaaccgattacaccaaccacaacagacaaagatttgtaatattttcatattattattcggttttcacagttgttacatttcttttcagtaaagtcttaattgcagataacagcgtttaatctatgatgatataactcaattattttcatgcacttaaatcataactaagataaatgttagtgtaagcgattacactgatgtgatttgcttcacatctttttacgtcgtactcacctatcttaattcacaataaaaaataaccatattggagggcatcatgcctgacgctaaaaaacaggggcggagtaacaaggcaatgacgtttttcgtctgcttccttgccgctctggcgggattactctttggcctggatatcggtgtaattgctggcgcactgccgtttattgcagatgaattccagattactagccacacgcaagaatgggtcgtaagctccatgatgttcggtgcggcagtcggtgcggtgggcagcggctggctctcctttaaactcgggcgcaaaaagagcctgatgatcggcgcaattttgtttgttgccggtagcctgttctctgcggctgcgccaaacgttgaagtactgattctttcccgcgttctactggggctggcggtgggtgtggcctcttataccgcaccgctgtacctctctgaaattgcgccggaaaaaattcgtggcagtatgatcagcatgtatcagttgatgatcactatcgggatcctcggtgcttatctttctgataccgccttcagctacaccggtgcatggcgctggatgctgggtgtgattatcatcccggcaattttgctgctgattggtgtcttcttcctgccagacagcccacgttggtttgccgccaaacgccgttttgttgatgccgaacgcgtgctgctacgcctgcgtgacaccagcgcggaagcgaaacgcgaactggatgaaatccgtgaaagtttgcaggttaaacagagtggctgggcgctgtttaaagagaacagcaacttccgccgcgcggtgttccttggcgtactgttgcaggtaatgcagcaattcaccgggatgaacgtcatcatgtattacgcgccgaaaatcttcgaactggcgggttataccaacactaccgagcaaatgtgggggaccgtgattgtcggcctgaccaacgtacttgccacctttatcgcaatcggccttgttgaccgctggggacgtaaaccaacgctaacgctgggcttcctggtgatggctgctggcatgggcgtactcggtacaatgatgcatatcggtattcactctccgagcgcgcagtatttcgccatcgccatgctgctgatgtttattgtcggttttgccatgagtgccggtccgctgatttgggtactgtgctccgaaattcagccgctgaaaggccgcgattttggcatcacctgctccactgccaccaactggattgccaacatgatcgttggcgcaacgttcctgaccatgctcaacacgctgggtaacgccaacaccttctgggtgtatgcggctctgaacgtactgtttatcctgctgacattgtggctggtaccggaaaccaaacacgttagcctggaacatattgaacgtaatctgatgaaaggtcgtaaactgcgcgaaataggcgctcacgattaatctccccaagcttcctcccatcgcggaggaagccacctcttgcagtcatcttttcttcgctctatcctctgccgctatgaaaacatcccgtctccctatcgccatccaacaggccgttatgcgtcgcctgcgggaaaaactcgcccaggccaacctgaagctagggcgtaactacccggagccaaaactctcttacacccagcgcggaacctccgccggaacggcctggctggaaagctatgaaattcgcctcaatcccgttttgctgttggaaaacagtgaagcttttattgaagaagtggtaccgcacgaactggcacatttgctggtatggaaacatttcggccgcgtagcgccacatggcaaagagtggaagtggatgatggaaaacgtgctgggtgttcccgcccgtcgtacgcatcagttcgaactgcaatccgtgcgtcgcaacaccttcccctaccgctgcaagtgccaggagcatcagcttaccgtacgccgccataatcgcgtagttcgtggcgaggccgtctatcgctgtgttcactgcggtgaacagctggttgcgaaataaccatctgaactatcaggaactttcctgatttggctgattgcataccaaaacagctttcgctacgttgctggctcgttttaacacggagaagtgcctacactagcgggattctttttgttaacccctaccccacgcgtacaaccgcgtggggagacgacgcggatttttaactatgcgtatcccccgcatttatcatcctgaaccactgaccagccattctcacatcgcgctttgcgaagatgccgccaaccatatcgggcgcgtactgcgcatggggccggggcaggcgttgcaattgtttgacggtagcaaccaggtctttgacgccgaaattaccagcgccggcaaaaaaagcgtggaagtgaaggtgctggaaggccagatcgacgatcgcgaatctccgctgcatattcacctcggtcaggtgatgagccgtggtgaaaaaatggaatttactatccagaaaagcatcgaactcggtgtaagcctcattacgccacttttttctgagcgctgcggcgttaaactggatagtgaacgtctgaacaagaagcttcagcagtggcagaagattgcaattgctgcctgtgagcagtgtggtcgtaaccgggtgccggaaatccgtccagcgatggatctggaagcctggtgtgcagagcaggatgaaggactgaaactgaatcttcacccgcgcgccagtaacagcatcaatacgttgccgttaccggttgaacgcgtccgcctgctgattggcccggaaggcggtttaagcgcagatgaaattgccatgactgcccgctatcaatttactgatatcctgttgggacctcgcgttttgcgtacagagacaactgcgctcaccgccattaccgcgctacaagtacgatttggcgatttgggctaacggagaagaataatgatcaagctcggcatcgtgatggaccccatcgcaaacatcaacatcaagaaagattccagttttgctatgttgctggaagcacagcgtcgtggttacgaacttcactatatggagatgggcgatctgtatctgatcaatggtgaagcccgcgcccatacccgcacgctgaacgtgaagcagaactacgaagagtggtttagcttcgtcggtgaacaggatctgccgctggccgatctcgatgtgatcctgatgcgtaaagacccgccgtttgataccgagtttatctacgcgacctatattctggaacgtgccgaagagaaagggacgctgatcgttaacaagccgcagagcctgcgcgactgtaacgagaaactgtttaccgcctggttctctgacttaacgccagaaacgctggttacgcgcaataaagcgcagctaaaagcgttctgggagaaacacagcgacatcattcttaagccgctggacggtatgggcggcgcgagcattttccgcgtgaaagaaggcgatccaaacctcggcgtgattgccgaaaccctgactgagcatggcactcgctactgcatggcgcaaaattacctgccagccattaaagatggcgacaaacgcgtgctggtggtggatggcgagccggtaccgtactgcctggcgcgtattccgcaggggggcgaaacccgtggcaatctggctgccggtggtcgcggtgaacctcgtccgctgacggaaagtgactggaaaatcgcccgtcagatcgggccgacgctgaaagaaaaagggctgatttttgttggtctggatatcatcggcgaccgtctgactgaaattaacgtcaccagcccaacctgtattcgtgagattgaagcagagtttccggtgagcatcaccggaatgttaatggatgccatcgaagcacgtttacagcagcagtaacccaccttagcgagaaggatctcgttgagactctgagtgacagcgcccttctttccacgcatactgggcgctgttgcttttttgaaccaggaaacagaacctctgacaatgaatttacagcatcactttcttattgccatgcctgctctccaggatccgattttccgtcgttccgtggtctacatttgcgaacataataccaatggtgcaatggggatcatcgtcaacaagccgctggaaaatctcaaaattgaagggattctggaaaagctgaagatcacgccggagccgcgtgatgaaagtatccgtctggataaaccggttatgctcggcggtccgctggctgaagatcgcgggtttattttgcatactccgccctccaattttgcttccagcattcgcattagtgacaacacggtaatgaccacttcccgcgatgtgctggaaacgctcggcaccgataaacaaccgtctgacgtattggtggctctgggttatgcctcctgggagaaaggtcaactggaacaagaaattctcgataacgcgtggctaacggccccggcagatctgaatattctgttcaaaacgccgattgccgaccgctggcgcgaggcggcaaaactgattggtgtggatattctcaccatgcctggtgtggcaggacacgcctgatgagtggaaccttactcgccttcgacttcggcaccaaaagcattggcgtagcggtcggccaacgcattaccggcaccgctcgccctttgcctgcaattaaagcacaggacggtacgccggactggaacattatcgagcgtttactgaaagagtggcagccggacgaaatcatcgtcggtttgccgctgaatatggacggcaccgagcaaccattgactgccagagcgcgtaaatttgccaaccgtattcatggccgtttcggtgttgaagtaaagctccatgacgagcgtcttagcactgtggaagcccgttccggtctgtttgaacagggcggctatcgggcgctcaacaaaggcaaagttgactctgcctctgcggttattattctcgaaagctatttcgagcagggatattaaggcgatttaaacgcctggcggagtgtaaataatatcatcgcgtcttattgccggatgcggcgtgaacaccttatccagcacacatctggcagcggctataggtctgataagacgcgttagcgtcgcatcagacatttattgcctttgtaggcccgataagcttgcgcatcgggcatggcaacgtcacaaacgcccttcccccacccggtgctgataactctgctgaaacgttatcatccccacctgctgcccggtttgaataacatgcggtaactggtgggttttcccttcgcgaatcaaattccccaccgcgggtgtgttaatcagcaattcaaatagcgccacgcgtccttcctgtttatccacttccagcttttgactcagcactgcccgtaaactacctgccagttgattacgcacggggtctttttcctgcgccggaaaactatccaccagtcgctcaactgcctgcgcggcaccacgcgtatgtaatgttgccagcaccaaatgcccggtttctgccgccgtcagtgccagacggattgtctcgctgtcacgcagctctccgagcaaaatcacatcaggatcttcccgcaatgcggcccgcaatccgcttgcgaacgtcatacagtgcaaaccaatttcccgctgctggatcaaacatcgctggctggcatagagatattcaacaggatcttccagcgtcagaatatgcgcatcggcatgttgattgagatagccaaccatcgccgccagcgtggtagatttgccactccccgtcgcccccgtcaccagaatcaggccattctcgctcttgagtaattccggcaataccgttggtgcgccaagctgttcgagctgcgggcagtggctaggtaacagccgtaacgccaggctaatgccatgccgttgcgcgaatgcgctgccacgcaatcgctggttttccgccaggctcacggcaaaatccagctgaccattctccagcaatattgcccgctgatcgtcatccagccactcccgcagtagctcttcgacgtccggcgtatcaaacggcgcagcttccattctgccgcgaatgcgccatcgtgcgggccaggcgctgcacaggtgtagatcgctgacgttatgctttacactaagggccacaatttcttccatattcatactaagatcctcggaaaatgaacgatattgcgcataacctggcacaggtccgggacaaaatcagtgcggctgcaacgcgttgcggccgttctccagaagaaattacgctgcttgcagtcagtaaaacaaaacctgcgagcgccatcgcagaagccattgatgccgggcagcgtcaatttggtgaaaactacgttcaggaaggggtagataaaattcgccactttcaggaactgggcgtaacaggattagaatggcattttattggcccgttgcagtctaataaaagccgcctggtggcagagcatttcgactggtgtcataccatcgaccgtttgcgcatcgctacccgtctcaacgaccagcgcccggcagaacttccccctcttaacgttctgattcaaattaacattagtgatgaaaacagtaagtccgggattcaactggctgaactggacgagctggcagctgcggtcgctgaactaccgcgtttacgtctgcgcgggttgatggcaatccctgcgcctgagagtgaatatgtaaggcagtttgaagttgcacgccaaatggctgtagcatttgccggactgaaaacgcgctacccgcatatcgacacgctctctctgggaatgagcgacgatatggaagccgccattgcggcaggtagcacgatggttcgtatcggcactgcaatttttggtgcgcgtgattactctaaaaaataaggaattaaaggaacgccatgaatacgttgactttcctgcttagtacggtcattgagctgtataccatggtgctgttattacgcatctggatgcagtgggctcattgtgatttttacaaccccttcagtcagtttgtagtgaaggtaacgcagccaattatcgggccactgcgccgcgttattccggcaatggggccaattgacagcgccagcctgctggttgcctatattctcagttttatcaaagccatcgtgctgtttaaagtggtgaccttcctgccaatcatctggattgccggtttactgattctgctgaaaaccatcggcctgctgattttctgggtcctgctggtgatggcgattatgagctgggtaagccaggggcgtagcccgattgaatacgtgctgattcagctggccgatccgctgctgcgcccgattcgccgcctgctaccggcaatgggtgggattgatttcagcccgatgatcctcgttctgctgctgtatgtcatcaatatgggtgtcgcagaagtattacaggcaaccggaaatatgctgctgccagggctgtggatggcgttatgaatgccgtaacagttaatgatgacggtctggttttacggctctatattcagccgaaagccagccgtgattctattgtcggtttacatggcgacgaagttaaagtcgccattaccgcgccgccggttgacggccaggccaacagtcatctggtgaagtttctcggtaagcaattccgggttgccaaaagccaggtggtgattgaaaaaggcgaacttggccgccacaaacaaattaaaatcattaatccgcaacaaatcccgccagaaatcgcggcgttaattaattaagtatcctatgcaaaaagttgtcctcgcaaccggcaatgtcggtaaagtgcgtgagctggcgagcctgcttagcgacttcggtcttgatatcgtggcccaaacagacctcggcgttgattccgctgaagaaaccggcctgacctttatcgaaaacgcgattctgaaagcgcgccatgcggcaaaagtgaccgctttaccggcaattgccgacgactctggtctggcggtagatgtgcttggcggcgcgccgggcatttactccgcgcgttattccggtgaagacgcgaccgatcaaaagaatctgcaaaaactgctggaaacaatgaaagacgtaccggacgaccaacgtcaggcgcgtttccactgcgtgctggtatatctgcgtcacgcggaagatcccactccgctggtatgccacggtagctggccgggcgtgattactcgtgaaccagcgggcactggtggctttggttatgatccaatcttcttcgtaccttccgaagggaaaaccgccgccgaactgacccgcgaagaaaagagcgccatttcccaccgtggtcaggcgttgaaactgctgctggacgctttacgtaatggttaaattacctccgctgagtctctacattcacatcccgtggtgcgtgcagaaatgcccgtactgcgatttcaactctcacgcgttgaaaggagaagtgccgcacgacgattatgttcagcatctgcttaacgatctggacaacgatgtggcttacgctcagggccgtgaagtaaagacaatctttattggcggtggtacgccgagcctgctttccggcccggcgatgcaaacgctgctggacggcgtgcgtgcgcgtttgccgctggcagcggatgcagaaattactatggaagcgaaccctggcacggtagaagccgatcgctttgtcgattatcagcgtgctggtgtgaaccgcatctctattggtgtgcagagttttagcgaagaaaagctgaaacgacttgggcgtattcatggcccgcaagaagcgaaacgcgcggcgaagctggcgagcggtttagggttacgtagctttaaccttgatttgatgcatgggctgccggatcaaagtctggaagaggcgcttggcgatctacgccaggccattgaactgaatccgccgcatctttcctggtatcaactgaccatcgaacccaatacgctgtttggtagccgaccaccggtgctgccggacgatgacgcgttgtgggatatattcgaacaggggcatcagttattaaccgcagcgggttatcagcaatatgaaacttccgcttacgccaaacccggttatcagtgccagcacaatctcaactactggcgctttggtgactacatcggtattggctgcggcgcacacggcaaagtgaccttcccggatgggcgcattctgcgtaccaccaaaacgcgtcatccgcgtggttttatgcaaggaaggtatctggaaagccagcgtgatgtcgaagccacagataagccgtttgagttctttatgaatcgcttccgtctgctggaggccgcgccgcgcgtggagtttattgcgtataccgggctttgcgaagatgtgattcgcccacagttagacgaggcgattgcccagggttatctcaccgaatgtgcggattactggcagataacggaacatgggaagctgtttttaaatagcctgctggagctttttctggctgagtaaacttgtattgccggatgcggcgtgaacgccttatccagccgacatgtggcagcggttgtaggtctgataagacgcgcaagcgtcgcatcagacgttgattgccggatgcggggtcaacgccgcatcctgctacaaatcgtgcactatatcaaacttacttaatcaccccattgcgccgcagttgttcggtatcttttttccagcgttcattagcttggttgatatcgtcaattttcatcaaaatcgcgacttttttactgtttatttcactaactttcatcgttaacggatattgccctttttcgagcgttacccagtcatcctgcaatttacggctaagtttttgactttgcagaaaagtctgtcgccgttgttcgttgatatcgaaatctcgtttctgctgaatcggcacttcataacactcttcactctgtttatgacatgccgcaatcgccggttgataaacctctttgtcatatttaaccgcgaacgcctcgctatcgttctgtttattaaactcatcacgctgttggtgaatttttttaaaggcgtcttcgcgggtcatttgcttaccgtttgcatcttttccccaatatgcatccgctgctttctgcgccgccaccatttgcttatcaagcgctttcacttccttttccagcgcaggaatgctgttcttctgggtattcaacgcagattcaagctgactaaagcgataattgaaatcttcgctattcacgatcagatatttattattcgttttgatatcgtcgaccacccgcccacgatcgctggctgccgcctgaaaagagtaaaagttcacgctccagccagacgcgggcgttcctttactggttaacatcgcgctgaattttaccggtttatctttcgtccaggtctgttcgagcagttcgtaatctgccaactgaccgacccaggtatagagatcgtcactggaagagacatcgccttccgcactccaggtggcctgattacccttagcatcaagattttttaaggtgatagcatcaagcttgagaatgccgtgatactgctttttgaattgatcttttaagatattttcagttggcggttcgccatctgcccaggcattaccagtcatcaacataagcagtgccgtgccaacaatccattgctttttcacccgaaaaacctcacgcggaataatttattccggtgattatcattagggtaattaaaattggcaatggacgtgagtctgaagtgaaaaagccccggcacgataccggggcgaggcgattagtactgattgaagatctgctggatctgctgcggatctttggtttgcgtcagagccagttgcagcagaacgcgcgctttttgcgggttcagcgtgccagaggcgacgaagccgtatttcgcatcatccacttcggcatcctgagtggtagcgcccgtcggtacgcgggaagaacgcacgactgcagtaccggttttcgcggcggtcgccagcgtgccgaacacagatttatacaggttgccgttacccacaccagcgctaacgatgccatcatagcccgcatctaccagtgctttagccggaagatcggatgcgttagcgtagttataaacaatgccgactttcggcagttcattcagcttagagacatcgaatggcgtgtcgctggtatgcttacgtgccggggtacgctggtagtcaatcttaccgttgtgaatgtaacccagaggaccgtagttaacagacttgaaggtcgctacgtcggtggtgttggttttggtgacgtcacggccatcaagcacggtgtcattcatcactaccagcacgccacggttggcggaggctttatcagctgcggtcactaccgcgttatacaggttgaatggaccgtctgcgctcatagacgtggacggacgcattgcgccgaccatcaccaccggtttgtcgcatttcaccgtcaggtcgaggaagtaagcagtttcttccatcgtgtcggtaccgtgggtaatgacgaagccgtcggtcttatcgcagtcggtgttaatttttttcgccagtgtcagccagacattatcgttcatgtcctgggagccgatattcactacctgctcgcctttaacgttcgcaatgtcttttagttgcggcaccgcattaaccagattttctacgccaactttacccactgtgtagttagatttggttgcggagtcaccaccaccggcaatggtcccgccggttgctaaaatggtgatattgggtaatgccaatgctgcaccactaaaacccataaccagtgcggcaagtgccgtctttttgaaaaactccatttcattcctccagttacgtgaacgctacgcattatcccttagctctgtatgggaaatttgacgttaaacaatttacaacgtgaatatattttggagatctacaaagttagaggcaggtaacaaaacgaagaattaaacggcataaaaaagtattatgccgtcttaaaatagaggattattttaaattcccgaccagggctttgcggctatcttccagagtcacaacgcggctacaaacatctttgccaaactgctggaaatctttttcctgctttttccactcggtttggatactggattgcagcccccccaggcttcccagcacattctgtaatgggttaccgccgctttttcagcaccgctttcgcgcccatttcattaatgctgtcctgtaaaattccacccattgcctgattcactaattgctggccttcggcgcgaacctgatcaatggctttatagtgaaacgtcaggccatcgctgcgcgtttcaataatgcggttcatctgctctttcagctgcgcatcaagtttggtcagacggctgcgcattttgctgctttcgcccatctcctgaacgataattttatccagagcaatacgggctttctcgacgcggcttttcgcgccttcatcaatccacggcagcgtgctgcgtagttcagcctgataatccttcgcctgctcgcgctgggcggcattcagggaatattgcttaccgttatacatcacgttgccgtctggcgtgatcaccagattgccgttttcgcccttcacctgcacggtttgcgggctgacaatcacatcgtcacgcggcgtgacgctgcactggtagtcggcgtgagcggtcattgccgtcacactaagtgctgccgccagcagcattttgcgcatcatagtcttccctcaagaaaaaatcaggccagcatttgctggccccagattgataacaaagtacgcgttttccatgccggatgcggcgtaaacaccttatcccgcctactcgatcgtgcatctttccaggcctgataagcgtagcgcatcaggcagttttgcatttgtcatcgcccgtatgctttcttagtcccaccaaacgtcgaaaagttcgctggtgcgtacctcatccagtttgcgctcttccagccacttacgcacaatcgcctgatgttcttcggtgcatttgccgatttcctgcatgcagatcagaccttcccaggccagataaccgctgccgtcaaaggccagtttgttcggttcgataacctcgttaataaaatcatcaacggttttatcaatctgttcttcgcttgtaccttccgggaatcgccatgccacgctaaatcctaattcctggaattcgtcgatgtgcatttttttacgcagacgacggctacggttctttgccattatttcaccctctcgaacattaagtcccatactccgtgaccaagacgatgaccacgttgttcaaatttcgtcaccggacgacttgccggacgcggtacgtaatcattgctctcactcaggtttttataaccgtcaatagaagacatcacttcaagcatatgttccgcataaggttcccagtcggtcgccatatggaatacgccccccagctgcagtttgctttttaccagttcggcaaacggcacctgaacgatacggcgtttattatggcgcgctttgtgccacgggtcagggaaaaagagctgcaccatgcgcaaactattgtcaggaatcattttatgcagcacttcaaccgcatcgtgacacatcacgcgcaggttgcttaaaccttcttcatgcgcagaagccaggcacgcaccaacgcccggactatgcacttcaatgccgaggaagtcctgctcagggcgatctttagccattgccaccaggctcgcccccatgccaaaaccaatctcaagcgtcaccggcgcttcacggccaaaaagcgcggggaaatccagcatatcttcgctgaactcaacgcccatcaccggccagtagttttccagcgcatgttcctggcctttggtcagtcgcccctggcggcgcacaaaactacggatacggcgcagtgggcggccgttttcatcaaattccggactaatgacgtcgtttttcataaaggtttagtcgcttgtgaaagtgttctgaaaacgggcattatccaaagttagttgccggatgcaagcatgataaggccgtggctgcggaaagttccggtttacaccctgccgtcgctgtgctgcaatcttgcccccaacaacagtgaattcggtgaccatgcaagcgagccaatttagtgcccaggttctggactggtacgataaatacgggcgaaaaactctgccctggcaaattgacaagacgccctacaaagtatggctcagtgaagtgatgttgcaacaaactcaggttgcgaccgttatcccctattttgaacgctttatggcgcgcttcccgacggtgaccgatctcgccaatgcgccgctcgacgaagttctccacttgtggaccgggcttggctattacgcccgcgcgcgcaatctgcataaagcggcacaacaagtggcgaccttacacggcggtaaattcccggaaacctttgaggaagttgcagcactgccgggcgtcgggcgttccaccgcaggcgcgattctcagcctttctctgggtaagcactttccgattctcgacggtaacgtcaaacgcgtgctggcgcgctgctatgctgtaagcggctggcctgggaaaaaagaggtcgagaataaattatggagtttgagcgagcaggtgacgcccgcggttggcgtggaacggtttaatcaggcgatgatggatttgggtgcgatgatttgtacgcgcagcaaaccgaaatgtagcctctgtccgctacaaaacggatgtattgccgccgccaacaatagctgggcgctttatccgggcaaaaaaccgaaacagacgctgccggagcgcaccggctactttttgctattacagcacgaagatgaagtattgctggcgcagcgtccgccgagcggattgtggggcggtttatactgtttcccgcagtttgccgacgaagaaagtttgcggcagtggctggcgcaacggcagattgctgccgataacctgacgcaactgaccgcgtttcggcataccttcagccatttccacttagatattgtgcctatgtggcttcccgtgagcagtttcaccggctgcatggatgaaggcaatgcgctctggtataacttagcgcaaccgccgagtgttggcctagcggctcccgtggagcgtttgttacagcagttacgcactggcgcgccggtttaacgcgtgagtcgataaagaggatgatttatgagcagaacgattttttgtactttcctgcaacgtgaagcagaaggtcaggattttcagctgtaccccggcgagctgggaaaacgcatctataacgagatctccaaagaagcctgggcgcagtggcagcacaagcaaaccatgctgattaatgaaaagaaactcaacatgatgaatgccgagcaccgcaagctgcttgagcaggagatggtcaacttcctgttcgagggtaaagaggtgcatatcgagggctatacgccggaagataaaaaataaaaacagtgccggagcacgcctccggcaacttgcataaaaacaaacacaacacgcacccggaatgatgaaaaaatatctcgcgctggctttgattgcgccgttgctcatctcctgtagcacgaccaaaaaaggcgatacctataacgaagcctgggtcaaagataccaacggttttgatattctgatggggcaatttgcccacaatattgagaacatctggggcttcaaagaggtggtgatcgctggtcctaaggactacgtgaaatacaccgatcaatatcagacccgcagccacatcaacttcgatgacggtacgattactatcgaaaccatcgccgggacagaacctgccgcgcatttgcgccgggcaattatcaaaacgttattgatgggtgacgatccgagtagcgtcgatctctattccgacgttgatgatattacgattagcaaagaacctttcctttacggtcaggtggtggacaacaccgggcagccgattcgctgggaaggtcgcgcaagcaacttcgcggattatctgctgaaaaaccgtctgaagagccgcagcaacgggctgcgtatcatctacagcgtcaccattaacatggtgccgaaccaccttgataaacgtgcgcacaaatatctcggcatggtccgccaggcgagtcggaaatatggcgttgatgagagcctgattctggcaattatgcagaccgaatcttcctttaacccgtatgcggtcagccgttccgatgcgctgggattaatgcaggtggtacaacatactgccgggaaagatgtgttccgcagccaggggaaatccggcacgccgagccgcagtttcttgtttgatcctgccagcaatattgataccggcaccgcgtatctggcgatgctgaacaatgtttatctcggcggaattgataacccaacaagccggcgttatgccgtcatcaccgcctataacggcggcgcaggcagcgtgctgcgagtctttagcaatgataagattcaggctgccaatattattaacaccatgacgccgggcgatgtttatcagacgctgacgacccgccatccctctgcggaatctcgccgttatctttataaagtgaataccgcgcaaaaatcctaccgccgccgataattccattaaccgcccctgacgatgctcaggggcaaaaatgttatccacatcacaatttcgttttgcaaattgggaatgtttgcaattatttgccacaggtaacaaaaaaccagtccgcgaagttgatagaatcccatcatctcgcacggtcaaatgtgctttttcaaacactcatccgcatcacgatgtgaggaaattaacatgaatcttaagctgcagctgaaaatcctctcttttctgcagttctgtctgtggggaagttggctgacgaccctcggctcctatatgtttgttaccctgaagtttgacggtgcttctattggcgcagtttatagcagtctgggtatcgcagcggtctttatgcctgcgctgctggggattgtggccgacaaatggttaagtgcgaaatgggtatatgccatttgccacaccattggcgctatcacgctgttcatggcggcacaggtcacgacaccggaagcgatgttccttgtgatattgattaacagctttgcttatatgccaacgcttgggttaatcaacaccatctcttactatcgcctgcaaaatgccgggatggatatcgttactgacttcccgccaatccgtatctggggcaccatcggctttatcatggcaatgtgggtggtgagcctgtctggcttcgaattaagccacatgcagctgtatattggcgcagcactttccgccattctggttctgtttaccctgactctgccgcatattccggttgctaaacagcaagcgaatcagagctggacaaccctgctgggcctcgatgcattcgcgctgtttaaaaacaagcgtatggcaatcttctttatcttcagtatgctgctgggcgcggaactgcagattaccaacatgttcggtaataccttcctgcacagcttcgacaaagatccgatgtttgccagcagctttattgtgcagcatgcgagtatcatcatgagcattagccagatctctgaaaccctgttcattctgaccatcccgttcttcttaagccgctacggtattaagaacgtaatgatgatcagtattgtggcgtggatcctgcgttttgcgctgtttgcttacggcgacccgactccgttcggtactgtactgctggtactgagcatgatcgtttacggttgcgcattcgacttcttcaacatctctggtagcgtgtttgtcgaaaaagaagttagcccggcaattcgcgccagtgcacaagggatgttcctgatgatgactaacggcttcggctgtatcctcggcggcatcgtgagcggtaaagttgttgagatgtacacccaaaacggcattaccgactggcagaccgtatggttgattttcgctggttactccgtggttctggccttcgcgttcatggcgatgttcaaatataaacacgttcgtgtcccgacaggcacacagacggttagccactaattacgcaaagaaaaacgggtcgccagaaggtgacccgttttttttattcttacttcaacacataaccgtacaaccgtttcacgccatccgcatcggtttcgctataaacaccttgcagctccgggctaaatcccggcaacaaattcaccccttcttccagtgcaaggaaataacgttgaaccgccccaccccagacttccccgggtaccacgcaaagcacgccaggtggataaggcaacgccccttctgccgcaattcgcccttcggcatcacgaatccgcaccaactccacgtcaccgcgaatataagcgctatgcgcatcctgggggttcatcaccacactcgggaaactctgctggcggaacatcgctttttgtaggtctttgacgtcgaaactgacatacagatcgtgcatctcctgacacaactggcgcagggtgtagtcgcgatagcgcaccggatacttgttataaacgctcggcaacacctcaaccagcgggctgtcatcctcaatatgctgttcaaattgcgccagcatcgccaccagttgtgccagcttctcgtggctttccgccggagttaataaaaacagaatggagttgagatcgcacttctccggcacaatgccgttctcacgcagatagtgcgccagaatcgtcgccggaacgccaaagtcgctatattcgccggtttcggcatcgatacctggtgtagtgagtaacagcttgcacggatcaacaaaatactgatccgcggcatatccttcaaagccgtgccacttcgcccccggctcaaaactgaaaaaacggcggtcgctggctaacacacttgtcggataatcctgccacaatttgccatcaacaacgggcgggataaacgggcggaacagcttacagcgcgcaagaatagccttgcgcgcttcaatccctatctcaacacactcagcccacagccgacgcccactctccccttcatgaattttggcgttaacatccagtgcagcaaacagcggatagaaagggctggtagaagcatggagcataaaggcgttattcaaccgcttatgcgggcaaaaacgcgcctgtccgcggatatggttatcttttttatggatctggctcgtctgactgaatcccgcctgctgtttgtgcacgctctgagtcacaaagatccccggatcgttttcgttaagttctaacagcagcgggctgctatccgccatcatcgggataaattgttcataaccgacccacgcggaatcaaacagaatgtaatcacacagatgcccaacggtatcgatcacctgacgggcgttatagacagtgccgtcataggttcccagctgaataatcgccaggcgatacgggcgcggcaggtcggctttttctggcgcaacgtcgcgaatttgctggcgcagatactcttcattaaaacagtgcgcatcaataccgccaatgaaaccaaacgggttgcgactagcttccagatagaccggcgtcgcccccgcctgaatcagcgcgccgtgatgattgctcttatggttgttacggtcgaagagcaccagatcgccacgcgttaacagcgcattcgtcaccactttattcgctgcgcttgtgccgttcagcacaaaataggttttatcggcatgaaagactttggctgcgaatttctgcgcatctttcgcgcttccttcatgaataagcagatcgcccaattttacgtcagcgttacacatatcggcgcgaaagacgttctcaccaaagaaatcgtaaaaatggcgtccggcaggatgctttttaaaaaacgcaccatgttgatgtccagggcaagcaaaggtgctgttgcccatctcaacgtactgcgtcagcgtgtcataaaacggtggcagcaaattctcttcatactgacaggctgcggattccagctccagccactgctgctcgttgccgttgattaccgccgtaacgcccgcaggtaattcaacagcatgttcggaatacaaaaacaccggtagatgaaaaccggtgcgcttaagcaacgcaagaatgccactgcgactatccgcagcggtaatgacgactgccgcgacgtccgtaaaatcagtatctcccaacgccaccacgcgacgatgagaagaaagtcgggataccagttcactactggcggcaatattcatacttttcataagcgcaaacccgtttcggggaagtaagaataccggacaaggtggaaaaccctgccccatgagatatgggtcaaactggtcaccagctccgaccgccagacatcagtaaaagcagaaacgctctgattttactgttgtcctgcagtgagcgtgcgttaacttcaccgcatgagcagtaacatagaaagggaaacgtttcgcgcgaaacggcgataagcgagagaatgtaaggagatggcgtgcatcgggcaaactccgtacagagaggagaaaattcgcgcaatcatggcacctttcgctaaagcgtgcaagccaggactttgcgaacaaacaagccatcgacggcaccaaacggtcataataagaaaatcaaacaatacagctaacaggaactcttgtggtcatcggcccttttatcaacgctagtgcagtcttactgggtggcgttctcggcgcactgctcagccaacgcttaccggaacgtatccgcgtctccatgacaagtatttttggtctggcaagcctggggattggtattttactggtggtgaaatgtgccaaccttccagcgatggttttagctacgctacttggcgctctaattggcgaaatttgtttgctggagaaaggtgtcaatacagcagtcgccaaagcacaaaatctgtttcgtcacagtcgtaagaagccagcgcatgaatcttttattcagaattatgtcgcgattattgtcctgttttgcgccagcggcaccgggatcttcggggcgatgaacgaagggatgaccggcgatccgagtattttaatcgccaagagttttcttgatttctttacggcgatgatcttcgcctgcagcctgggtattgcggtaagcgtgattagtatcccattactgatcatccagttaacgctggcgtgggctgccgcgctgattttaccgctgaccacaccgagcatgatggcagacttcagcgccgtaggcggtttattgctgctggcaaccggattacgcatctgtggcattaaaatgttcccggtggtcaacatgcttccagcactccttctggcaatgccgctttccgccgcctggaccgcctggtttgcctgacaatgcgtgcaatatcggcaaagtgatgatagattgtgcagtctgcagtaaattgaagaaatttgattgacgagacgaggcgaatcaggtttaatgcgccccgttgcccggatagctcagtcggtagagcaggggattgaaaatccccgtgtccttggttcgattccgagtccgggcaccactaattcttaagaacccgcccacaaggcgggtttttgcttttggatctgacaataaccttcacgaaaaaaattagcttataaagtctgggggaattactctcgccacgttaacgagagtaattttattgatattaatctcctgatactttacccccgtccaaactccagccgctgcacattcaccatcccaggcttctcagcagcactgacatcaatttgtgtcacccgcagcgcatagaacgccattttgaatttacgaacggacgcattatcagtgactttaacggcatgggcaaagtgaaatatcattttttaacgataaaaagagtgttatttcttgtgtatcagacaataagcattcattcaaaacctttagaaataatcaaaacacaggtattccactggttaatatattcacatatgaaatgaataaatattggaatatataaatattgaatattttgattaatccccgtactgattattcttcataatcagtacggggttgctacaacatgtattactttttcaccacaattaacggttcaatatcactctcttttttgatgaccagactttcatcaccgcgcaaacacgtcccaccgtagttgccgccaacggtgaaggtacatacctgaatgtatttaccgtccactttcggcaaacaccacagttgctgatagatgtttttctgctcggcaaatttaccgctggttttgtccagcacctcttcatgatggctgacgaggtcgatattgctgccacagcgaccggcgatcggtttcactgcgtaacctgttttcaccagttcatcattaacagtgaaatcggtatccagcaggtaacgatggtgcgggaacaggctccagaggatcggcagaatcgctttgttgccggggatcaccgtccacagcggctcaaagaccagcacttccgggcgcagcaatacgtcgataagacgcacttcgttttgcggatgaccggtacggattggcaccgcagcaaactcacggtcgctaacttcacgaatctgatcaaacgcggtttcccacgcccaggttttccacacgcagttaaccagtcgcccttccccatcaatcagttgcccggcagcatcccagcccagttcatccaatccacgcaagatacgcgtttcaaagcccgcctggtgcagcgcctgctccataaactgcgcgtgatagttttcctcgatatctttgtcctgcatgatatggacaaacggacgtgcacgactgtgtttccaggcaccagccaattcgttaatcagcccttccgccggattgaagccgttgcctttatagccctgctccgcccaacgttcgaggatcaagcccgcttcggtatgacaggaggcggagtcggcgttgtactcgtaaaccttcaggccacgctcatccatgcagaaatccatacgaccagtgatcatatggtgacggcgacgctgccaggagagacgcaaacgtggccagaggattttcgggatgtcgaacagcgccagcaggttgtcatctttcagcaccttgtcggttgcgtgaagatacatcaggtgcagctcgttggtggctttaattagctcctgctcggcactctcggtaatggtgtagtaatgataaggatcctgattgatcacctgaccgttggcctgcacataggcgttttgcagcggatctttttcatccagccatttaccgtcaaactggcctttgttttccaggcgcgctccgctgattttcagcagctcgcctgcaatttccggctgcggtaagctgtattcagtatcttccgtctggatcatccagcccagaatggtggtgtcatcaaaagtgtctttcagggtatagcagccgttttcgaccaccatctccagctcgcgcgtccactgttgcccttgcggcaacggggaatgaatcacgttctgttccgcaatacggactttgttgccatgcaattgggtaatgatggcgacatggccagtgtctttaaattcaccgcctttatcccagataagaagcgcacccgcgaccggcgcacgcgggctgccgttaggaaatgcctgcaatggcaggatgttgtcattaaccacttctcgcaggaagcgcaggctgaaaatctcccacgccatacccacgtcagtaaagaccacaccgtaattcagaaagagaaaacggcgagcaaattcaacgcattgccacttgtggcccatatattcgtcgtcgatatagctacggaatacggcgtcatcttcgtattcctgcggatcgagagaactgtaatcactagagtagattgctaccccacctggggcgtagcccaataatgtcccgaacggggcatcctggctggtcgttcctttgctcatcactttacctttaacaatacaacctaagcagttggcgtaattgttgtgctctgattacctgctcagcgacattaaccggacagaggtcagactaatcatacacctcatcgcagcggctggcgcaaagggttaaaaaattcacattctgtacagcaagtgacctgctacactgcttcaacactaccactcagaaggcaactcactatgacagacaatacttatcagcccgcgaaagtctggacgtgggataaatccgctggcggcgcgttcgccaatatcaatcgcccggtttctggtccgacgcatgaaaaaacgctgcccgttggcaaacacccattgcaactttatagcctgggaacgccgaacggtcagaaagtaacgattatgcttgaggagctgctggcgctgggcgttactggtgcagagtacgacgcctggctgattcgtattggcgatggcgatcaattctccagcggctttgtcgaagtgaacccaaacagcaagatcccggcgctgcgcgatcatacgcataatccgccgatccgcgtgtttgaatctggtagcatcctgctttatctggcggagaaatttggctacttcctgccgcaggatttggcaaagcgtactgaaacgatgaactggctgttctggttacagggcgcggcaccgttcctcggcggtggttttggtcacttttaccattacgcaccggtaaagattgagtacgccatcaaccgctttaccatggaagccaaacgtctgctcgacgtgctggataagcaactggcgcagcataagtttgttgcgggcgatgagtacaccattgcggatatggcgatttggccgtggtttggcaacgtggtgttaggtggtgtgtatgatgccgctgagtttcttgatgcgggcagttataagcatgtacaacgctgggcgaaagaagtaggcgaacgtccggcggtgaaacgtgggcgtattgttaaccgcaccaacggaccgctgaatgagcagttgcatgagcgccatgacgccagtgatttcgagacgaatacggaagataagcgtcaggggtaagggttggtgttcgtcgcagcaagccatccaggccggataaggcgttcacgccgcatccggcaatcgtgcacaatgcctgatgcgacgctgccgcgtcttatcaggcctacgaaagctaatcatcacgcgctggtaatgtcgtaatccatttggcgcagtgcgtctaatgtggctttggcttcatcttcgtcgatgatgctcatggcaaatccgacgtgtaccagcacccactggcccagtagatcggcagggttaccttcacaaatcagggcgatattcacatcgcgcttgataccacatacttcaacctgcgcaagctggtgaatatcttcaccgacagccagcacctggcctggaacgccaatacacattattaactccggttattcaacttcaatacttttgacgatcaggctatcgccggtatcgacacgcaaccgctcgccgtgacagagcggacactgcgcatcgtgctgatgaatctccaccacctggctgcaatcccagcaccaagcctgggcgggtttatagacgatatgtaaatcgcacccttgcgccaccgttccgtggcagacaatttcaaaactaaaacggacggcgctctcctcaacgcaggagagcgcgccaatttccagccacacggcggtgacgcgcttaacatcgtgctgctccgcctgccgttggataatttcaacggcgctctggcaaagagacaactcatgcattttcgccactcctgcgaccaaacagcagggcgcgacgccctgcgtgtggtacatccggattcgtgactggcaggctaaggatcattcgtgcgcagtcatccgtcaggcgttggccctcttcaatgctcatgctgtggctaagcgggctcatcaggctacaggagagatattggctaacaccgtccagttcgccaacggtaaaggtcatagtgccatacggcagttgcagaccaattttttcactcactttgcgcagcggccagagttgatccgggccggggaagataactgcactcagcatccacggggtgatcacacaccccgtccactgaccttcgaacagcgtaaaatcagaaacatacaccggcatactaggatgcagaaaagagagatcgtgcatgctacgccgggcaatttcttcaaacactgcctgtacttgcgccttcggggaggtctggaaacctgctatctcttcagtcatgaatcgcctcccgtgggatggcttccacgccagattcacgcagcgcagccagaacctgctcaagcgcaggttcaatcattgcttcaaccgtcggcgttaagccgatgtgtggctccaggctttccgggatcacgccgaccagggtcagctttttcggaaactcgccggtgaagcgcagggcgctcaagacgtcggccaggccaagctgatgcggagagattttgttggtaaacaacgccggaacttcttcatcccgcaggatcatcatcgttcccggcgcgttctttttgctgacaatggcatccgcaataatcaaatgatcgcgatttgccatgtcgccaagcagctccattcccgccgtgccgccatcgaggatctcaacataatccggcagaatgtatcgttgctctaacgcttcgacaatccgcacaccgatggcttcatcggtcagcaaaatattgccgacccctaagactaaaatacgcattacagaaccttcacactaaccacttcgttgccgtcagcatccactacgtgtaccgcacaggccatgcacgggtcaaaggagtgaatggtacgcaccacttccagcggtttattcggatcggcaaccggtgtacccaccaggctctgctcgtaaggaccgacgtcatcattgaagttacgcggaccagagttccaggtacttggaacaaccgcctggtagttgctgatgataccgtctttaataaccatccagtgagagagcataccgcgcggcgcttcgaggaagccaacacctttgaattcacccgttgccggaatgttcggcttcacaaaggtggtgtgatcgcctttgccgatattggtgatcagtgcactgtattggttttgcaggatatcctgcaattcacagcagtgaacggtacgaccaataatacggcccagcgtggagtgcagctgtgccacttccagcgtgttgccagtcagtttctgataaatcgcaacgatttcattcagtttgttctgggtagattcgcgacctgccgccagtttcaccagcatattagccagtggccccacttctaccgttttgccgtagaaagtcggacttttcacccaggaatatttcccgtcgtcagaccaaccatcataagccggaatggtggtgccttcccacggtgcctgcggcgcttcgtctttataccaggagtgcttcgcgctttcctgaatgcctttgatcaggtattcatcggaatgagaagtgatcggacgatagctggacagatccgcattctcaatgtagccgcccgggaacaggaagctgccgtttttactgtcggtcgggaattccggcacgctcaggtagttcaccgcacctttaccgcgtgtcagccattccgggtagaacgcggcaataactgcggtatcaaccttataaacctgctcaacaaagtcgctcagtttgtcgatgaaagacttgatgtacatcaggcgctcaaggttcagcacgcccaaaccgtcgaggttgatcgggttcgcgacaccacctaccgccaggttctgaatgtgcggcgttttaccgcccagcagcgccacgacgcggttagcgtcacgctggcactccaacgcttgcaggtagtgcgctaccgcaatcaggttcacttccggcggcagtttcatcgccggatgaccccagtagccattagcgaaaatacccaactgaccgctggcaaccagatctttgatcttgttctgaactttggtgaactcttccggactgttcaggtgccaggtgctaacgcctttcagcatttcggaggctttggttgggtcagcttgcagtgcagaagtgatgtccacccagtccagcgcgctaagctgatagaaatgaacaatatggtcatgcgtggtgtgcgcagccagaatgatgttacggatgtattgcgcgttaaccggaacgtcgatattcagcgcactttctgccgcacgaacggaagacagcgcgtgagtggtagtacatacgccacagatacgttgcacaatcatccatgcatcgcgcggatcgcggtttttcacgatctcttccatgccgcgccacatggtaccggaagcccatgctttgctaacgacgccattttcgatttcgcaatcgatgcgtaaatgcccctcaatacgggttaccggatcaatagtaattctctggctcatgctttgctcgcctcatgacgattatgatcgttttgttttaaaggaggaagtatcggcagtagacgaatgagtacgatgtaagcgcaaatctcaatagccacaaaaccaatagaaatcaacagttcttcccaggtcgggaagtaggcgtaaccgccgcccgggttgaatgccaccaggctataggtcagacgccaggttgcacaacctaacagtgcgctcagtgcactcaggaacagcatgcgggaatcattacgcagcttcgccacacgcagaacgaccagcgggaagagcatcagcaggacttcaatccagaacatcacggagtagaagtcaccggcaaacgctaagctcagcttgtcgcgatagataagctcgccaaagcgcagcacgatgaaaatcgccagcaacacactgatggtgttggtcagcttaacaaacagactcttttcatccggaccgttgccacgcagacccgcctgcaccaggctaccttcaaagatgacaatgctgaagcccatgatgaacgccgtcagcaggctgaacagcggcaacatttcatagctctgccacaacggatgcaccttgtagcccgcgctgatcatcaggctccccatactagactggtgcatggtcggcagcagcgcaccgagcgcgatgatgaagaacatcaccttgtttagtcgctgtaggctcaccttccaccccagacgttcaaacagtgccggagcaaactccagtgccatcacgccgatatagatggtcatacagaccgccgtctcgaacagtacgctgttcacgttgaagtgacccggaatgtagaagtacggcaggttccagtagcgacccacgtcgatagtgatgctcaagccacccagactgtaaccaaacagactcgccaacagcgccggacgcaccagcggatggtattgcccacggttaaagacgtataccgcccacgccagcgcccagccgccacaggcaaagccggtgccaatcagcaggtcaaacgcgatccacacgccccacgggaagccgccgttcaggtcagagacagagcccagaccgaacaccagacgcttcacaatcaggagcatacagatgacgattaacggtccaaaaatcatgaccggtttactgatgattttgccgcccagcggttgtggatcatgactcatgatcgtctcctccgtcgtgattattcaactctcatgatcgtctcctccgtcgtgatggtcgtttttggtgttgcgacgaaccagcacggttaagcccgccagcacagccagtggtagcatcatgcctttatacagggtgtgttgaatattttcggaacgcgcaccggtagaaagatcgtccagtttcggcaggtcgagattttcataaggcacacccgtcagtaccagaacctgagtaccgccgccctctttctcgccgtacagatgcggataatatttcggcaccgtatgcaggtaagtgtcgccagatttcagcgtctgacgcggatagtggtattcgctgccaggcttcagcgccagacgttttttcgcctccgccatcagctcttcacgcgtaccgaaaatcaccgcgcccgccgggcacacttctacgcagccaggtagaccgcctttatcgagacgttccacacctttctggttgcacagctcgcacttatgcagcgcaccaaacgggttgttgtagtcgtacttcggcacgttgtacggacaggcgaccatgcagtaacggcagccggtgcacacatctttgtcgtaatggacaatgccggttttcggatcttttttcagtgcagagaccgggcacacagagacacagttcggatcgacgcagtgcatacactgtttcttaatgtacgcgtagccgttctcctcctggtctttgttgacccctgtgccgctggtccacacctgaatgatgttattggtatacgggctcagtttgtcgttgttgctccaggtctgttccccttgcgggttacgttcagggaaattgatatcctgacacttggtgacgcaagcctggcagcctacgcacaaggtgctgtcgtacaacatccccaggcttcccggaattggcgggcggttttcagcagccgcatgactgacagacggcagcgcgcccgtcagcaatgccccgcaggaggctgctttaataaaattacgtctgttcacggttattctccccgactgtcagcgttatctttcttttgctgacgacccagttcacgcaccgccatcacgctgacaccggcaaccaacccaaccacaccgccgagcaaaccaatagcgcctgcagagacgttgccgccctctttagcgttaacatccggtttctgactacgcggagtttgattttcgacgttggcaagctgatggatgcctttatggaagccgataccttcttcgttacagccatagcaagggtgaccaatcgccaccggccacacaccgccaacatcgcagaattgcagcgtactgcagttgccgtaagtttctggccctttacagccgaggtggtacaggcaccagccttcgcggtggccttcatcaccgaactctttggcaaaacgaccagcatcgaagtgcgggcgacgttcgcagtgttcgtgaatcagacggccataggcgaaggtcggacggtttttgtcatccagtttcggcggtttgccgtaagtgatgatgtgcgcaacggtcgcgaggaagttgtgcgggttcggcgggcagcccggaatattgataacggttttgcctggcagaacttcttgcaggctgactgcgccagttgggttaactccagctgcggcaacaccgccccacgcagagcaggaaccgatagcgataatggctgctgcgccttccgccgctttgcggatgtgatccacaatcggctcaccggcaaccatgcaataaataccgttatcttttaatgggatggaaccatccaccactaacacatactgccctttgtacttctcgagagcgttatgtttgttctcttcgacctgatgaccgaaggcggcggaaagcacttcgtgatactccagagagatagtctccagtacgaggttttctaccgttggatgcgttgcacgaagcagagattccgtacaaccggtgcactcctgcgcgccaatccagataactggcggacgctgcgggttagtaacgctttcggccatctctgcagcggctttgctacttaaccccatggtggcggctaatgctgcacaaagcttcatgaaatcacgacggttaatgccgtgagaatggatgagggtgttatctccagtcatttatagttattccgttgcgaagacctggcatatattttgcctcaatcgcaaaatcaataatgcgatcgatgcgccatttaccacacatttattatggttatcgatatcatgatactgcggcggggcgctaaaacgaagggaagaagcattagtgtaattaattaaagcaagataatacgtatgtttgatcaattttcgaggcgataaccggccataaaaaagcgcaacgtagaacaggaattattctcacgaaagaaatccattaccatctctttatccagtccatagcggcgcgtcagaatacccgcttcccaggcgctaagctggcgatctccggtcttttcgtacatccggtgactgtagcctaatacaaaaccgcgtttataatcggcacagaattttgtcacattaaccgcactgtcggcatgcgttgcttttaatcccgccattaagcctttaccaaaatggttattcatcgttcacctcattcgctatatattgtcatatatagcgatattttaggcaaagaacgacttttgcgcacgctattttttcatgcttgtttaagacgtaatcccgtaagagataaacctatcaggagagatatttatcgaaccatttcagtgtcctttgccaggcaagatcggcggcagatttgtcataacggggcgtggaatcattatggaatccgtgattaacccccggatagatatacgcctcataaaccttattattggctttcaacgccgcctcgtaagcaggccagccctcgttgattcgggtgtccagttccgcgaagtggagtagtaaaggcgcttcaatcttcgccacatcggcagtgggtgcctgacgaccataaaacggcaccgcgcaggccagttccggatacgcgacagccgccgcgttgcttacgccaccgccatagcaaaatccggtaatacccactttgcctgtcgcttgcggatagcgttgcataaactcaattgcggcaaagaaatcattcatcagtttgttggatcaacctgctgttgcagctcacgacctttatcatcatttcccggataacctccaacggaacttaagccgtcaggtgccagggcgatataccccgccttcgccactcgccgtgccacatcttcgatatacggattcagtccacgattctcatgcaccaccactacggctggcgttttgccgctcatctttgcgggcttcaccagataaccccgcacctcgccgtgaccatttgggctaggatacgtgatgtactcagcaacaatttccgggtcggtaaactctacctgagtcgccagcgcataatttggcttgagcaaatcaaacaacgctaatgccgtcatcccgcctaccgcacttcgccgcaaggttgaggaactcacgtttcgagattttcccgtgagcgtaatagtcatagtaatccagcaactcttgtgggaaatctttggcggttaaacgcggcatcgttgcactcctcagttggtgtttttttaagcaaagcataagcacgtatttttgcccagtttttcgtcactctgtgagccagactacgggatacgcgctggcgaatcgctaaactagaaacattgtttcgaaattgaacggtggaaaggagaggtcatggtctggttagcgaatcccgaacgttacgggcagatgcaataccgctattgcggaaaaagtggtttacgcctgcccgcgttaagcctcggtttatggcacaatttcggtcacgttaacgcgctggaaagtcagcgtgcgatcctgcgtaaagcgtttgatttgggcattacgcactttgatttagccaacaattacgggccgcctccaggaagcgcagaagagaactttggtcgcctgctgcgggaggattttgccgcttatcgcgatgaactgattatctctaccaaggctggctacgatatgtggcccggcccttacggctctggcggtagtcgtaaatacctgctcgccagcctcgaccaaagcctgaagcgtatggggcttgagtatgtcgatatcttttactctcatcgcgtcgatgaaaatacgccgatggaagaaaccgcctctgcgctggctcatgcggtacaaagcggtaaggcgctgtatgtcgggatctcctcttacagcccagagcggacgcaaaaaatggtcgagttgctgcgcgagtggaaaattccgctgttaattcatcaacctagctacaatttactgaaccgctgggtggataaaagcggcctgctggataccctgcaaaataacggcgtgggctgtattgcctttactcctctggctcagggattgctgaccggaaaatatctcaacggcattccgcaagatagtcggatgcatcgtgaagggaataaagttcgtggtctgacaccgaaaatgcttaccgaagccaacctcaacagcctgcgcttattgaatgaaatggcacagcagcgtggacaaagtatggcgcaaatggcgttaagctggttgctgaaagatgatcgcgtgacgagcgtattgattggtgccagccgcgcggagcaactagaggagaacgtgcaggcgctgaataatctgacatttagcaccaaggagctggcgcagattgatcagcatatcgccgatggcgagctgaatctgtggcaggcgtcttccgataaatgacctgttaataacgggcgcgcgaaccgcgcccgaatcagatcagtgattatgacgagtcagtcggtcaagatagcccatcacaaatgcagaaagcacaaacgtcagatggataatgacgtaccacatcagtttgttatccgggacatttttcgcatccataaagacgcgcagtaagtgaatggaagaaattgccacaatgctcgctgctactttgtttttcaggctcgttgcgtccattttccccagccagttcagcttctctttgttctcggagatatccagctgactgacgaaattctcataaccggaaaacatcaccatcaccagcaaaccgccaaccagcgtcatatccaccaggctcagcaacacgaggatcaaatcactttccgccatgctgaagatattcggcagtacgtgaataatctcctggaagaacttcagcgccagggcaactaacgccaggctaaggccaaagtacacgggggcaagcagccagcgagaagcatacattgcattttcaagaaaacgttccatacattcctgtcgtgtagttaaaacgggcaacagtatatcgcaattgagtaaacagcacgcaacagcaaatcaacatatacgttaaacctttgtcgcataattctgaggtttagggatcttcctggttcccttatcaacgcatcgagaacgtctacccttaaaggacgttgaacctgaagggagaaaaacgatgtctcatttaaaagacccgaccacgcagtattacactggtgaatatcccaaacagaaacaaccgacgccaggcatccaggcgaagatgacaccggtaccggattgcggcgagaaaacctatgttggtagcggtcgcctgaaagatcgtaaagcactggtgacagggggcgattccggaataggtcgcgctgccgccatcgcttacgcgcgtgaaggggctgacgtggcgatcagttatcttcccgtggaagaagaagacgctcaggatgtgaaaaagatcattgaagaatgcggacgcaaagccgttctgctgccaggcgatttaagcgatgagaaatttgcccgtagcctggttcacgaagcgcacaaggcgttaggcgggctggatattatggcgctggtcgccgggaaacaggttgccattccggatattgcagacctcaccagcgaacagtttcaaaagacctttgccattaacgttttcgcgctgttctggctaacccaggaagcgatccccctgctaccgaaaggtgcaagtatcatcaccactagcagtatccaggcataccagccaagtccgcatttactggactatgcggctacgaaggcggcgattctgaactacagccgtggcttggcaaaacaggtcgcggagaaaggtattcgggtgaatattgtcgcgccaggcccgatctggacagcactgcaaatttccggcggacaaacgcaggataagatcccgcagtttggtcagcaaacgccgatgaaacgtgcggggcaaccggcggaactggcccctgtatatgtttatctggcaagtcaggagagcagctacgtcaccgcagaagtgcacggcgtgtgcggcggcgagcatttaggttaaaaaaatgcccggttgtgaaaagcaaccgggcatcattgtgaattcactcttacctgatgtggcgaaaacgccttatccgcctacaaacgcatgaagattcaacatgttgcaatagattttgtaggcctgataagcgtagcgcatcaggcattgagcacctaatgccggatgcgtcgtgaacgccttatccggcctacaaacgcacgaagattcaacatgttgcaatagattttgtaggcctgatgagcgtagcgcatcaggcaattctactttacttcgctttggcggtttcttcgccgaccagacctatcttcaggtaacccgcctgatgcagcgtatccattaccttcatcaacgtctcgtaatcgacggttttgtccgctcggaagaagatggtggtgtctttcttgccttcggttaacgcattcaacgccgtaatcattgtttcatcggtgaccggatcgttaccgataaacatgctgttgtctgccttcacgctcagataaaccggtttttccgggcgcggctgcggcgtgctggtagaagcaggcaagttcaccttcacatctaccgtcgctaacggtgccgccaccataaagataatcagcagaaccaacatcacgtcgataaacggcgtcacgttgatatcatgcatttcgccgttatcgtcgaggttttcgttaagatgcattgccatcggatattatcctgcgcgtaatttttgtgcgacacgaaccggatgcgcagcggcgctggcttccagatccaggtcacggctttgcagcaacaatacctgcgctgcaacatcacccagcatcgctttaaagccgccaatctggcgtgcaaatacgttatagataacgaccgcaggaatcgctgccacgaggccgattgccgttgctaacagagcttctgcgatacccggcgcaacgactgccaggttagtggtctgcgtttgcgcgataccaataaagctgttcatgatgccccagaccgtaccaaacagaccaacgaacggagaaatcgcgccgatggttgccagatagccgttaccgcggcccatttgacgacccactgcggcgacccgacgctccagacggaagctggtacgttctttaataccttcgttatcgtcgctgccttcactcagttccagctcattctgcgcttcattgagcaaatgcaggcttaagcttttgctaccaaaatcagcggcgatatcgttggcctggtttaaggaacgcgcttcagccagcagttgctgctcgcgcttaaggcgacgcttctgattgaagaactctacgctcttactgaagaagattgcccaggtgactacggaggccaaaataagcccaatcatcacgcacttaacgacaatatcggcgtgctgatacataccccagacggaaaggtccgtctgcattaaattattacccactgtgtatctccaggacgcaagtcacaaaatctgcgcataataatatcaaaacgacgtcgaattgatagtcgttctcattactatttgcatactgccgtacctttgctttcttttccttgcgtttacgcagtaaaaaagtcaccagcacgccatttgcgaaaattttctgctttatgccaattcttcaggatgcgcccgcgaatattcatgctagtttagacatccagacgtataaaaacaggaatcccgacatggcggacaaaaagcttgatactcaactggtgaatgcaggacgcagcaaaaaatacactctcggcgcggtaaatagcgtgattcagcgcgcttctagcctggtctttgacagtgtagaagccaaaaaacacgcgacacgtaatcgcgccaatggagagttgttctatggacggcgcggaacgttaacccatttctccttacaacaagcgatgtgtgaactggaaggtggcgcaggctgcgtgctatttccctgcggggcggcagcggttgctaattccattcttgcttttatcgaacagggcgatcatgtgttgatgaccaacaccgcctatgaaccgagtcaggatttctgtagcaaaatcctcagcaaactgggcgtaacgacaagttggtttgatccgctgattggtgccgatatcgttaagcatctgcagccaaacactaaaatcgtgtttctggaaagcccaggctccatcaccatggaagtccacgacgttccggcgattgttgccgccgtacgcagtgtggtgccggatgccatcattatgatcgacaacacctgggcagccggtgtgctgtttaaggcgctggattttggcatcgatgtttctattcaagccgccaccaaatatctggttgggcatagtgatgcgatgattggcactgccgtgtgcaatgcccgttgctgggagcagctacgggaaaatgcctatctgatgggccagatggtcgatgccgataccgcctatataaccagccgtggcctgcgcacattaggtgtgcgtttgcgtcaacatcatgaaagcagtctgaaagtggctgaatggctggcagaacatccgcaagttgcgcgagttaaccaccctgctctgcctggcagtaaaggtcacgaattctggaaacgagactttacaggcagcagcgggctattttcctttgtgcttaagaaaaaactcaataatgaagagctggcgaactatctggataacttcagtttattcagcatggcctacagctggggcgggtatgaaagcttgatcctggcaaatcaaccagaacatatcgccgccattcgcccacaaggcgagatcgattttagcgggaccttgattcgcctgcatattggtctggaagatgtcgacgatctgattgccgatctggacgccggttttgcgcgaattgtataacattgccacttttggacaattttgcagacattttattgtgaaaagtcttaaattgttgcgtccgggatcaaggcgtcccggacgattcaggagtacaataggcagataaaggcttaaacgctgttccacaggaaagtccatggctgttattcaagatatcatcgctgcgctctggcaacacgactttgccgcgctggcggatcctcatattgttagcgttgtttactttgtcatgtttgccacgctgtttttagaaaacggcctgctgcccgccagttttttgccaggcgacagcttgttgatactggcaggcgcattgattgcccagggggttatggattttctgcctacgattgcgattctgaccgccgcagcaagtctgggctgctggctaagttatattcaggggcgctggttagggaataccaaaacggtgaaaggctggctggcacagcttcctgctaaatatcaccagcgcgccacctgcatgtttgaccgccacggtctgctggcgctgctggctggacgttttcttgcatttgtccgtacgctgctgccaaccatggcgggaatttccggtctgccaaaccgccgcttccagtttttcaactggttaagtggattgctgtgggtcagcgtggtaaccagttttggctatgccttaagtatgattccgttcgttaaacgccatgaagatcaggtaatgacgttcctgatgatcctgccaattgccttgttaaccgctggcttgttaggcacgctgtttgtggtgattaaaaaaaaatactgtaacgcctgacgattttccccgttcccggttgctgtaccgggaacgtatttaattcccctgcatcgcccgcattcttgccgcatcttcccccggcgtcacaccgaagtaacgtttaaactcacggctaaattggcttgcgctttcatagccgacgcgcatcgctgctgcgctggccttcatgccgtcatggatgatcatcatccgcgccttatgcagacggtaattcttcaaatactgcaacgggctggtactggtgacagacttaaaattatggtggaacgcgcttacgctcatgttggcttctgccgccagttgctcgacgctcaggttttcggtgtatttattctcaatccgtttcagcacgcggctaatcagactgaagtgagtctggcgactgaccagcgccagtaacgcgccgccgcaaggtccggtcagcacgtagtacagaatttcgcggatgatctgtttgccgagaatacgcgcatccagtggtcgctccatcacgtcgagtaaccgctccgccgcgcataaaatctcttcacttaacgtggcggagttaatcccgctggctgccatgctcggctggaaatgctcatcttcgccaatgtccatcaacagttcctgtaactgcaaaatatcgacattgagacgcaaccctgccagcggcacctcactcgtggcataggtttcgcactcaaacggcaacggcaccgtcagcagcaggtattcattggcatcataacgaaacacgcgttcattgatataaccgattttatgcccggaaaagagaattatgatgccaggctcgtacatcaccggtgtacgtgcgaaaggcgtctcgccatacaacaaacgcacatcgggcaacagtccactcaaactattttctttatttttcagtttattaactttatccgccagcaagcggcaaatctcttcacgtttcatatcgcgtaatttcttaggaataatgcggcaattactttgtgcgcaattttgtagcatttctccagcactctggagaaataggcaagacattggcagaaatgagcattgagagccagggcgctggcgatcacaatgaaaaacatcaggcagatcgttctctgccctcatattggcccagcaaagggagcaagtaatgaacaactttaatctgcacaccccaacccgcattctgtttggtaaaggcgcaatcgctggtttacgcgaacaaattcctcacgatgctcgcgtattgattacctacggcggcggcagcgtgaaaaaaaccggcgttctcgatcaagttctggatgccctgaaaggcatggacgtgctggaatttggcggtattgagccaaacccggcttatgaaacgctgatgaacgccgtgaaactggttcgcgaacagaaagtgactttcctgctggcggttggcggcggttctgtactggacggcaccaaatttatcgccgcagcggctaactatccggaaaatatcgatccgtggcacattctgcaaacgggcggtaaagagattaaaagcgccatcccgatgggctgtgtgctgacgctgccagcaaccggtagtgaatccaacgcaggcgcggtgatctcccgtaaaaccacaggcgacaagcaggcgttccattctgcccatgttcagccggtatttgccgtgctcgatccggtttatacctacaccctgccgccgcgtcaggtggctaacggcgtagtggacgcctttgtacacaccgtggaacagtatgttaccaaaccggttgatgccaaaattcaggaccgtttcgcagaaggcattttgctgacgctaatcgaagatggtccgaaagccctgaaagagccagaaaactacgatgtgcgcgccaacgtcatgtgggcggcgactcaggcgctgaacggtttgattggcgctggcgtaccgcaggactgggcaacgcatatgctgggccacgaactgactgcgatgcacggtctggatcacgcgcaaacactggctatcgtcctgcctgcactgtggaatgaaaaacgcgataccaagcgcgctaagctgctgcaatatgctgaacgcgtctggaacatcactgaaggttccgatgatgagcgtattgacgccgcgattgccgcaacccgcaatttctttgagcaattaggcgtgccgacccacctctccgactacggtctggacggcagctccatcccggctttgctgaaaaaactggaagagcacggcatgacccaactgggcgaaaatcatgacattacgttggatgtcagccgccgtatatacgaagccgcccgctaagctttttacgcctcaaactttcgttttcgggcatttcgtccagacttaagttcacaacacctcaccggagcctgctccggtgagttcatataaaggaggaacgtatggctaatccaaccgttattaagctacaggatggcaatgtcatgccccagctgggactgggcgtctggcaagcaagtaatgaggaagtaatcaccgccattcaaaaagcgttagaagtgggttatcgcagcattgataccgccgcggcctacaagaacgaagaaggtgtcggcaaagccctgaaaaatgccagtgtcaacagagaagaactgttcatcaccactaagctgtggaacgacgaccacaagcgcccccgcgaagccctgctcgacagcctgaaaaaactccagcttgattatatcgacctctacttaatgcactggcccgttcccgctatcgaccattatgtcgaagcatggaaaggcatgatcgaattgcaaaaagagggattaatcaaaagcatcggcgtgtgcaacttccagatccatcacctgcaacgcctgattgatgaaactggcgtgacgcctgtgataaaccagatcgaacttcatccgctgatgcaacaacgccagctacacgcctggaacgcgacacacaaaatccagaccgaatcctggagcccattagcgcaaggagggaaaggcgttttcgatcagaaagtcattcgcgatctggcagataaatacggcaaaaccccggcgcagattgttatccgctggcatctggatagcggcctggtggtgatcccgaaaagcgtcacacctagtcgtattgccgaaaactttgatgtctgggatttccgtctcgacaaagacgaactcggcgaaattgcaaaactcgatcagggcaagcgtctcggtcccgatcctgaccagttcggcggctaacatgcaaattctcccggtggcggtaatgttccgctaccggacttttcagaaatcatttattcccctcgcgtcccgcccgttgttactcttccttgttcaggaatgccaaatataaggacatcatcatgcagagccggaagctcttaaaagaacaactcatctatatccgggataaacgcaacggagaggtgaaaaacagatgaaaataatacttctgtttttagcagccctggcaagttttaccgtacacgcacagccccccagtcagaccgtagaacaaacagtccggcatatttatcagaactataaaagtgatgccactgccccttattttggtgaaaccggagagcgggcgataacttctgcgcgtattcaacaggcgcttaccctgaacgacaatcttacgctgccgggcaatattggctggctggattatgatccggtttgtgattgtcaggattttggcgatctggtgctagaaagcgttgcgataacccaaactgacgccgatcatgccgatgccgttgtgcgctttcgtatctttaaagatgataaagaaaagaccacgcagacactgaaaatggtggcggaaaatggtcgttgggtcattgacgatattgtcagcaatcatggcagcgtcttacaagcagttaatagcgagaatgaaaaaacgctggccgctttagctagcttgcaaaaagaacagccggaagcctttgttgccgaactctttgaacatattgctgattatagctggccgtggacgtgggtggtttccgactcttaccgccaggcggttaatgccttctataaaaccaccttcaagacggccaataatcccgatgaagatatgcaaatagaacggcaatttatttacgacaatccgatctgttttggcgaagagagcctatttagtcgcgttgatgaaattcgagtcctggagaaaaccgccgattccgcccgcattcatgttcgttttacgctgaccaatggcaacaacgaagagcaagaactggttttacagcggcgcgaaggcaagtgggaaatcgctgattttatccgcccgaacagcggcagcctacttaagcagattgaggcaaaaactgccgccagattaaagcaatgagctgaattaaataacaattagccggaacaataaataaaagggaacactatatgaaaacgattttcaccgtgggagctgttgttctggcaacctgcttgctcagtggctgcgtcaatgagcaaaaggtcaatcagctggcgagcaatgtgcaaacattaaatgccaaaatcgcccggcttgagcaggatatgaaagcactacgcccacaaatctatgctgccaaatccgaagctaacagagccaatacgcgtcttgatgctcaggactattttgattgcctgcgctgcttgcgtatgtacgcagaatgataaaaaaatccccggtagcgtgtcagttgccggggatattttttaacgtccaaccgccgctttaggccgtttcttcgcaccagcattcaccggacgagattgcgtagagctcgctttttttgccgtagcaggcgtctgacgctgggtcgccatcggcgtatgtttcgtcaacgccggacgggtattgcggttctggcgacgagcttcacgcatctcttcaatggttggcgcaggcactaagcaatcgcgacggctgccaatcagatgctttttgcccatcgcttccagcgcctggcggattaacggccagtttgccggatcgtggtaacgcaacaacgctttatgcaaacgacgctgtttgtcgcccttcggtacgaagacgtcttcgctcttataaccaatcttcgccagcgggtttttcccggtgtaatacatggtggtactgttcgccagcgggctcggatagaagttctgcacctggtcgaggcggaagcggtgctttttcagccacagcgccagattcaccatatcttcatcacgcgtaccggggtgcgcggagatgaaataggggatcagatactgctctttacctgcctgtttactgtaagtatcgaacagctctttaaagcggtcatagctgcccatgcccggcttcatcatcttgcttaacggcccttcttcggtatgttccggggcaatcttcagataaccgccgacgtgatgggtcgccagttctttgatatagcgcggatcttctacggctatgtcataacgcacaccagaggcaatcaggatctttttaatgcctttcagatcacgcgcacggcgatagaggttgatcgttggttcgtggttcgtgtccatgtgcggacaaatatccggataaacgcagctcaaacggcgacaagtttgttcagcgcgtgggcttttgcagcgcaacatatacatgttggcagttggcccaccaagatcggaaatcacgcccgtaaaacctggaacggtgtcgcggatcgcttcgatctcattaatgatgctatcttcggaacggctctgaataatgcgcccttcgtgctcggtgatagaacagaaagagcagccgccaaagcagccacgcataatgttgacgctaaaacggatcatttcgtaagccggaatacgggcattgccataggccggatgtggcacgcgcttgtatggcagcgcaaaaacgctgtccatctcttcggtagaaagcggaatagcaggcgggttgatccacacatagcggtcgccgtgtttttgcatcaatgcgcgggcacagcctgggttggtttcgtggtgcagaatacggctagcatgggcgtacagcactttatcgcccttcactttctcgaaagaaggcagcaacacgtaggttttttcccacggtttcgggcgcggtggctgcacggttacggctttggcttcctgctttttcggtgccaccggtttgttatccgcgcacggcaaatcttcaccatacggatgcgggattgggtcgatttttccaggggtatcaagacgggtggaatccacgccgctccagccaggcagcgcctctttcacgataatcgcggtattacgcacatcgcggatttcactaattggctcgcccatcgccagacgatgcgccacttccaccagcggacgctcaccgttaccaaacatcagcatgtcggctttgctatccaccagcacggaacggcgcacggtatcggaccagtaatcataatgcgcggtacggcgcagactagcctcaataccgccgaggatcaccggtacatctttccacgcctctttacaacgctgggtataaaccagtgtggcgcgatccgggcgcttacccgcgacgttatccggcgtgtaggcatcgtcatgacgtaaacggcgatcggcggtataacggttgatcatgctatccatgttgccagcagtaacaccgaaaaacagattcggtttacccagacgcataaagtcgtctttgctgctccagtccggctgggcgatgatcccgacgcgaaagccctgcgcttccagcatacgaccgcaaatcgccatcccgaagcttgggtgatcgacatacgcgtcgccagtaaccaaaatgatgtcgcagctatcccagccaagttgatccatctcttcacgagacatcggcaaaaacggtgccggtccaaaacaggcggcccagtactgcggccaggagaacaggtcgcgatccggttggatcagggagatagagctcattttgcttccagaaatgataaaaaaataatcaaaggccggggattataagccggaacgaaagagaaatcgaaaggtattccatactcgccctcctcgggcgagtatgaagattacggtaccggattgaccaacagttgcccaatgctgccacggtccgccatttccagcgtctgactgttgaagtagaacgggaagtgcgcccaggaaggctgaccgaaataaacaagcagctccacttgtccgtcaacccaaacggtatctttccagcctctgtcttccgggaacggcatcgcgccattcacgttacggatctggaacattacgccttcaatatggaacgcttgcggctcgtccgcgcgtaccgtccagcgttcccacgttccttgctgcgcggtgacatcaatacggttgacgtcccacagctgtccattaatacccgggtcatcacccagactgatatcgcgactgcgaattgggctaccagccatgatttcagttggcagcaagcgcatcggaagactgtctgtgaccagcggcagaaggccggttgggcgcagcgttagcaccagggtagaaaccagaatactggatggctcaaagaagccacgaatacgatcaacaatgctcgccgcttcgccacaggtgatgctcacttcatcgccgttgctcatatccaccagaatctcgcggcgctcgcccggtgccaggctaagttgcttcacgcttacaggagcaggcaggaatccctgatcgccagaaatcacatgtaacgggcgaccatcgttcatctgtagttgatagcgacgagagttgctcgcgttcagcagtcgcaagcgcacccagccacggctgacttcaacgtacgggctttgtacaccgttaaccagcagcgtatcaccaacaaagccgccgcttcccggttcgttgtattctggcgtaccaaagttatccagccgtttatcctggataatgaccggaaaatcatccacaccataatggttggggataggcaggctcttgctgacttcatcttccaccagccacattccggcaaggccgttatagacctgctgagccgtgcggttgggagtattggcgtgataccacagagtagctgcgttctggcgaatgggcagtacgggtgcccagtcagcgtttgggctcatcatccgtgccggaccgcccatcagcgggcctggtacctgtagcccggccaccgtcatactgacattttctgtcaggcggttgctgtaaataagcttaacatcgtcgcccttccagacgcggatagtcggccccaggtaacgaccattgattccccagacgctcgcgcgtgtccctggcgtaaaactccagtgcgcacgttgtacagtcataaacagcggttgcccacggcgagattcaagtagcggcggaacgggtagcggttgctgttgcccggctgcgctggccttcaggggaacagcgcctgcacaaagtgcaatcccgcttgcctgaatgaactgacgccgactgagactcatatttgctccatgtaaaactggctaaagtaataccgtgcaggaaagtgttccccgcaaaaatacagattgccgacttaaacttttccggcggcttcgcgttctgcgacttctttatcgagctcggcgattttttgttccattatgctacgacaatgggcagccagctcacgaacctgatctttgccatactgactgacgtcaattggcggcagcatttcgacaatcaccagaccgttgtgcagtcgattaagattaatcttattgctagttgtagagacgcacacgggaataatcgggacgcccgccgcaattgccgcgtgaaatgctccagtcttgaacggtagcaggccgcgaccacggctgcgggttccttccgggaacatccagatggaaatacggcgttttttgaagtgattcactacttccgcaatggtgccgtgagctttagtgcgattgtttctgtcgatcaataagttgccggttaaccagtacaactgcccgaagaaggggatccacagcaagctctttttacctaccgtcaccgtcggcggttgcacgatgttgcttgctgtcaccatgtcatagttgttctggtggttagcgatatagatagcattgccgtagctttcagcgtctgtaggtttacggcactcaactttcaggccaaacagcggcgcaagacggccaaacatatgcccaaaggtggccacatgtttcgggttacgcgggctgaaaaggcagtaaatggagccgaatacacagactaagatgctgtaaatcacggtaataataagacgaaagatatatagcataacaccctctgaaggtctgagagactggcattgtacgtcacctgaaatcaggttagggcattgttaaaagccgctctctggaaaagcgtattgttaatcgcaacgcatgaataaacaacggtttcaagggaatttttatcgtttccgggggttgaatacgctgccggatgacgacttaacgtttcatccggcgttccttgcaagcgggaggaaacagcgccctccccggcatattactcttcgctatcaccgctgctggcacggcgaggagagtcgatctcaacacgatcgatacgctgcaaaccgcgcatcaacgtaccgcggcgtccacgttcgccagtgactttctgtaactcttccgggcgcagtttaattttgcgtttcccaacatgaatggtcagcgtgctttgcggcggcagaacgtacaattgcgccagaccatcttctccacgcgcggcttctgcgcttggaatgttgataatcttgttgcctttgcccttgctcagctgcggcagatcacttaccgggaacatcaacatacggcctgcctgagtgattgccagcagcatatcggaagcatcttcaatcaccaccggcggcataacatgggcattttccggtaaggtgatcaaagccttacctgcacggttacgcgccaccagatcgttaaaggtgcagacgaaaccgtaacccgcatcggaagccatcagcagtttctgatcgtcgctttccatcagcatatggtcaacggtcgccccaggcggcaacgttaatttgccggtgagcggctcgccctgaccacgcgcgctcggcagcgtaatcgggtcaatggcatagctacgaccggtggaatcaacaaacactaccggttggttgctcttacctttcaccgccgctttgaagctatcacccgctttataattcaggcccggcgcgtcgatatcatggcctttagcgctgcgtacccagcccatctggctcagcacaatggtgacaggttcagacggcagcatgtcgtgctcgctcatcgctttcgcttcttcgcgttcctgcaacgggctacgacgatcgtcaccgtaggcttgcgcgtctgcctgcagttctttcttcagcaggttattcattttacgctcggaagccaaaatgccctgcaactggtcgcgctctttttccagttcactctgctcaccgcgaatcttcatctcttccagtttggcaagatgacgcagtttcagttcgaggatcgcttccgcctgggtttccgtaaggccaaaccggctcatcagcgccggtttcggttcatcttcattacgaatgatctcaatcacttcgtcgatattgagaaacgccaccagcaaaccttcgaggatatgcaggcgcttgaggactttctccagacgatagttcagtcggcggcgcacggtatcgcggcggaacaccagccattcggagaggatttccagcaggtttttcaccgccggacgaccatccagaccgatcatattaaggttaatacgatagctcttttccagatcggtggtagcgaagaggtggttcatcacctgatccatatccacgcggttggaacgcggcacaatcaccaggcgggtcgggttctcgtggtcagattcatcgcgcagatcgtcaaccatcggcagctttttgttgcgcatttgcgcagcaatttgctccagtacgcgcgcaccactaacctgatgcggcaatgcgctgataaccaccgcgccatcttctttcttccacaccgcgcgcatacgcacactaccacgtccgttctcgtagattttacggatctcggcgcggctagtgataatttccgcttcagtcggataatccggcccctgcacgatatccagcagctgatcgagcgtggttttcggctggtcgattaatgcgattgccgcctgagccacttcacgcaggttatgcggtggaatatcggtcgccatgccgacggcaataccggtggtgccgttaagcaaaatgtttggcagacgggcaggtagcattttcggctcctgcaaagtgccgtcgaagtttggcacccagtcagccgtcccctgccccagctcgctcaatagcagctcggaatatttgctcaaccgggattcggtgtaacgcattgccgcgaagcttttcggatcgtccggcgcgccccagttcccctgaccatcaaccagcggataacggtaagagaacggttgcgccatcaggaccatcgcttcataacaggcgctatcgccgtgcggatggtatttacccagtacgtcaccgacggtacgggcgctttttttaaatttggcgctggcattcaggcccagttcagacatcgcatacacaatgcggcgctgaacaggtttcagaccatcaccaataaacggcaacgcacggtccatgatcacgtacatggagtagtttaagtaggcgttttccgtaaattcatgtagcgcaaggcgctctgccatatcgctcattaattctgattcctcaacttattcgccagccttcaaaggggcaatattgccggagatactacattatctgccgcgtcgagtcacaggagatcaacgtgaatagcgccgccggacgtgctccgacggcgataaaggcatcaatgtgccttgatatacaactctttgctgtagacataatcctggggattatgcagcggaaaaccgccaacgtagggtttaagcagtttgattaacggctgatagtagataggaatcagcggtgcctgttggttgatgatcacttctgcctgctgatacaacgcattacgctttgtcgcatcagtgatctgcgtggcctggtttagtaaggcgtcatactgcgcatttttccagtgaccgacgttttcttcactatcgcttttgagcgtgttcaggaagctggaagcatcattgtacgtcgcatcccagctctgccgagacagcatgaaatcaccggctcgtcgggcatcaagataggttttccactccattgtgcgcagcgtcacctgtgcacccagccattttttccattcggaagacaacgctatcgcggtcttttcatgcagatcgtacttgttgtagaacagctcaaagcgtagcggatgagaggcgtcgtatcccgcctgtttcagcaaggcttttgccatcgcgacgcgctcactcattggcttttgcagttcatcgaacgtcgtcgcgctaaagccttttacctctggcggcgtcagcgtggttgcgggcgttctcaaccccagtaccttttgcgcaataagctgtcgatcaaccgtaagatatagcgcccgacgcactcgcacatcgttaaatggcggtttctcaaggttgaagttgtaatattcgctgttcagacgcggaataattcgtagctcgccaggcagacttttttcaatggcgggaatttgctgcgccggaacccaggtgagatcgacctctcccgcgcgatagcggttatagccggtgacgctattatctagcgccagatactcaacctgttgcaatactgtatgttgcgcatcgcggtactttggatttttgcgtgcagtaatcttttcgttaactacccactgatcaagcacaaaggcaccgttgtaaaccatgttctctggcttactccagctatcgccatgtttagcgatgacatgatgaggaaccgggaacagcgtcggccaggcgagcatcgtcgtgaaccaaggaaccggctgctcaagcgtaacttcaagagtacgatcatccgtcgctttgacacccaggcttgtaacatctgctttacccgcaacaatagctgcggcattgttaatgtgcgcctgtgccagatagccagcaaaagggcttgccgttttcgggtcaaccgcgcgctgccagccgaggacaaaatcctctgccgtcagaggctgaccgtcggaccactgcaaaccgctacgcagatggaaaatatagcgcttgccgccgtccagtatctcccagcgttcagcctgagcgggctgcacctggccttcaccgtccatccataccagaccttcaaacagatccagcacaatctgcgcggcagtattctcctccaccttttgcgggtcgagcgtacctgggtcgctatgattgttgtaacgaaagacttgttgcggggcgagcggtgtgttggcgggaacgtcagcagcgtagagaggagccgcacttaccaggctgaccagccataataaatttcgcgtatacatggtattccttaccggagaaattataagcccaacaacaatacgcctgtggcattgttcgctcaaacttatcgcgagtgatttggctcacactccggtaaagaaaaaagcgagttgcccccgcttttccattaattaacggatttcattcaatagttctggatgcttatccagaacacgtaaaagtttgattgtggaaggatgaggttgggcattgcctttttcgtaacggctaaacgcatttacacctcccccaaaaatttcgcttgcctctttttgggtaagagagagcttttttcgaaccttcactataaattcaggtgccactgtttcggcattcacgctagcccgaaatgcctttacttgcgccatgaaagcatcactctcttctttattcatgatgctctcttcgcaatggacacaatataaaccgtggatacctttcaatactgtttttcgtccacggaaggtgtatggaatatctttaatgccagaaaccatttctccctggtggcaaaccggacatttcatattacttctccttaaagctgacgatcagtacgtcatgaattaccgtaattttaagataaacctggcctgtaacaagcctgggtctgtaaacatcctgccagatagtatgatcagagtaggtggtcatgcttttataaaagtcgctctcacttaatccaatgataacattacacataccatcaaaatccaaacctaactcatctgcatttaacagggcactacgtgttgtacgaacttgcccggcattgacaagttttttaacctgactcaaacgtgtatgtggtgtgcgtttttccataacccccgcctccctgttactttagttataacctaaaaggttaattacagcaatgaaaaagcacctaaaaggttagttagatgtacggagatagtgaccacacaaaacgtattctttaaggaaagtgattgaccatataagaaagtggcgcattagtagcgccagtttgaagcaggaatttataagggaagctggagtcaggcatcacgccaacggcacataaacatccgtttccagtcgctgctctgtcaccccttcggcaagattggtgtagtgaaacagaatcggtgctttacgcattttctcgccgcttgcaggcagccagtggcgaatgatgccccataccgtgtgactaatatcgtccagctcgccaacgtggcgggccacggcataacgtccaccggtaagttcaccattgctcacaccataacgattatcgggaatcggttcgctaacgctgccgcagatatcaaagcgaaacgcttccggtgcggtggtggcagggtcgtcccaggcgacgccaaaagtctggctttggttaacaggagaaagcccgtctctttacgccacatgataaatttcgccacgctgtagttgagcaattcagggctacagcggtgcggcaacatcgccacaggtatacttgggaaatcgataatgtttacatccagtgtcaggtttgtcattttgcctccctgcgaaattattcccgggaacgcgtcccgggagcggtaacaattacggatttactttgcggatctgtttgacgtcaatttcaacagaattccagtctttatcgacttcaccctgaatctcaaccgtatctttcggcgtcaccgtcacgccgttccagcgtttgtggtcgatatcaacattgatagtaccgctggcatctttgaacacgtagagatcgtcagagatgcgttcaacgatattgccgcgcagggttacccaggtgtcgtcacgcagggattttgcgctttctacagtcgttacgctgccgttcggcccctggaatcctccggcctgactttgcgttgcgcttgggccagaaaaaccgccctgctctgctgccatcaccggtgcgctgcacagggccattactgcgattactgctgcgaattttttcatgtttattactccctttaatgtctgtttccgagcatttaacaagatagtccttaacaacttcttaagggaaaaaaataaaatttagtgctgtacagagcgcgttacaacacggtttactggcagcaaatacggttatcgcagggatgaaaaaatgcgaattttactgatagaagatgacatgctgattggcgacggcatcaaaacgggccttagtaaaatgggttttagcgtcgactggtttacacaaggtcgtcagggaaaagaggcgctttatagcgcaccttatgatgcggtgatcctggatttaaccttaccaggcatggatggtcgcgatattttgcgcgaatggcgagaaaaaggtcagcgtgagccggtactgatcctgaccgcgcgcgatgcgctggcggaacgtgtagaagggctgcgtctgggagctgacgattatctgtgtaaaccttttgcgttgatagaagtcgccgccaggctggaagctctgatgcgccgaaccaacggccaggccagcaacgagctgcgccacggtaacgtcatgctcgaccccggcaaacgtatcgccacgctggctggcgaacccttaacactgaaaccaaaagaatttgccctgctggaattactgatgcgtaacgctggtcgggtactgagccgcaaactgattgaagagaaactgtatacctgggacgaagaggtcaccagtaatgccgttgaagtgcatgtgcatcatctgcgacgcaaactcggtagtgattttattcgtaccgtgcatggtattggttacacattaggtgagaaatgaaatttacccaacgtcttagtctgcgcgtcaggctgacgctaatctttttaattctggccagcgtgacctggctgctttccagctttgtcgcctggaaacaaacaacggataacgtcgatgaattgttcgacacccaactgatgctgtttgccaagcggttaagtacgctcgatctcaacgaaatcaacgcggcggatcgcatggcacagacgccaaatagattaaaacacggtcatgttgatgacgatgcgctgacctttgccatctttacccacgacggcagaatggtccttaatgatggcgataacggagaagatattccctatagctatcaacgggaaggttttgctgacgggcaactggtcggtgaagacgatccttggcgttttgtctggatgaccagtcctgatggcaaatatcgcatcgttgttggccaggaatgggaataccgtgaagacatggcgctggcgattgttgccgggcaattgatcccgtggctggtcgcactgccgattatgttaatcatcatgatggtactactgggtcgtgaactcgcgccgctgaacaaactggcgctggcactacgtatgcgtgaccctgacagcgaaaaaccactaaacgcgactggcgtacccagcgaagtgcggccactggttgagagcctaaatcaactgttcgcccgcacacatgcgatgatggttcgtgaacgacgctttacctccgacgcagctcacgaacttcgtagcccgttaacggcgctgaaagtgcaaaccgaagttgcgcagctctctgacgatgatccgcaggcgcggaaaaaagcactgctccaattacattccgggatcgatcgcgctactcgtctggttgatcaactgctcacgctaagccggctggacagtctggataaccttcaggacgtcgcggagatcccgcttgaagatctcctgcaaagcagcgtgatggatatttaccacacggcgcagcaggcgaaaattgacgtgcgactgacactcaatgcccacagcatcaaacgcaccgggcaaccgctattgctaagtttgttggtgcgaaatttgctggataacgccgtgcgctacagtccacagggcagcgtggtagacgtcacgctgaatgctgataatttcatcgtgagggataacggccccggtgtgacaccagaggcactggcgcgaattggcgaacgcttctatcgcccacccggacaaaccgctaccggcagcgggcttgggctaagcattgtccagcgaatcgccaaattgcatggcatgaatgttgaatttgggaatgcggaacaaggtggatttgaggcgaaggtaagctggtaacttctctgtctatgagagccgttaaaacgactctcatagattttattaatagcaaaatataaaccgtccccaaaaaagccaccaaccacaaaccagacaaataccgaggctgaatacatatacccaaaactcgaacatttcccgcataaagagttttcttaagataagaataataagtggcgtaagaagaaaaaatgctgcaatcattgcttgcaatatacgatcttcgccactaacggaaggtatactgcaaatatttcctccgctctcaagcatccagtcatacttattgaaagcaaaaaaagaatctattaaccaataagtaagcattatatatagcaatgcttcaaatattgttttaattttctgctttaacatatatcagtacgctcataaaaatccatttataattatcaacatgacacgttgatactttcatcttttacttattcaaagccatattttcaatccccaaaaaaaccgaaccaaacgtgtaaattattccggtgcgagtaagaattatgaggaatggctatcagtattgtcattttcagaaaatatttatcctgcatcggtgagtcagagtaagatcagacttttgctaaattcgcaaaagactttgcacattttgctaatttcaccgtaccgctctgtgacgtactatagtcggcaaacgtctcaccttgaggttaaaaaatgagcaacatcctgattatcaacggcgcgaaaaaattcgcccactccaatggtcaactgaacgacaccctgaccgaagtcgcggatggcacactgcgcgaccttgggcatgatgtccgcatcgttcgcgccgacagcgactacgatgtcaaagcggaagtacaaaactttctctgggctgatgtggtgatctggcagatgccaggctggtggatgggcgcgccgtggacagtgaaaaaatacattgatgatgtattcaccgaaggtcacgggacgctgtatgccagcgatggtcgtacccgcaaagatccgagcaaaaaatacggttccggcggcctggtacagggcaaaaaatatatgctttctctgacctggaacgcaccaatggaagccttcaccgaaaaagatcagttcttccacggcgttggcgttgacggtgtgtatctgccgttccataaagcaaaccaattcctcggtatggaaccgctgccgacatttatcgctaatgacgtgataaaaatgcctgatgttccccgctatactgaagaatatcgcaagcatcttgtggaaatttttggttaactagagctcaggctttagaaggagttaaccatgcttaccgtaatcgcagaaatccgtactcgtcctggtcaacatcaccgtcaggcggtattggatcagtttgctaaaatcgttccaaccgtactgaaagaagaaggttgccacggctatgcgccaatggtggattgcgcagctggcgtgagtttccagtctatggcaccggattctatcgtgatgattgagcagtgggaaagcatcgcgcatcttgaagcgcatctgcaaaccccgcacatgaaggcgtatagcgaagccgtaaaaggtgacgtgctggagatgaatatccgtattctgcagccagggatttaatcctgccttgtttgcccggccatcctgaccgggcaatgttctttcctttaaacctcaatctccgccatgtcgcctttctcttgcaaccagttgcggcgatcttcgctgcgtttcttcgccagcagcatatccatcatcgcgtcagtacgctgatcgtcttcatcatcgatagtcaactgcaccagacgacgagtgttcggatcaagcgtggtttcgcgcaattgcatcgggttcatttcccccagacctttaaaacgctggacgttcggcttgcctttcttgcgttttaattgctcaagtacgccctctttctcttcttccgtcagcgcgtaataaacctctttcccgagatcaatacggtagagcggtggcagtgcgacgtaaacgtgaccgtgtttcaccaacgcgcggaaatgttttacgaacaaagcgcagagcagcgtggcaatgtgcagaccatcagagtccgcatccgcgaggatacagattttgccataacgaagctggctcagatcgtcgctgtcaggatcgataccgatcgctacgctaatatcgtgcacttcctggctagccagcacttcgtcggaagagacttcccaggtgttaaggatcttacctttcagtggcatgatcgcctgatattcgcgatcgcgcgcctgcttggcagatccgcctgcggagtcaccttccacaaggaacagctcggtacggttaaggtcctgcgcggtacaatcagccagtttgccaagcaacgccgggccgctggtcagctttttacgcaccacttttttggccgcacgcatacggcgctgggcgctggaaatcgccatctccgccagcagttcagccgcctgaacgttctggttcagccacaggataaaggcatctttcaccacgccagaaacgaatgccgcgcattgacggctagagagacgctctttcgtctgcccggcaaactgcggatcctgcatttttacactcagcacataggcgcagcgatcccagatatcttccgcgctcagctttacaccgcgcggcagaatattgcggtattcacagaactcacgcatcgcgtccaacaggccctgacgcagaccattaacatgggtaccgccctgcatcgttgggataaggttgacgtagctttcggtcagcagttcaccgccttccggcagccacagtagcgcccagtccacagcttcagtatcaccagcgaaattaccgataaacggtttttccggcagcgtcggcagaccatttaccgcttccgccaggtaatcattcagaccgtcctgatagcaccagcgttgttcggtattgttgatctcatctttaaaagtgatctcaacgccagggcacaataccgctttggctttcagcacatgcgtcaggcgactaacagaaaatcgcgggctgtcaaagaaggtttcatccggccagaagtgcacactggtaccagtattgcgtttaccgcaagtgccgacaacctgtaaatcctgcaccttttcgccattttcaaaggcgatgttataaacctgaccatcgcggcgcacgttaacttctacgcgcttgctcagggcgttaaccacgctaatccccacgccatgcaggccgccagagaactggtaatttttgttagagaatttaccgcctgcatgcagacggcaaagaatcagttcaaccgccggtacaccctcttccgggtgaatatccaccggcatcccgcgcccatcgtcaataacttctaagctctggtcagcatgtaaaataacgtccacgcgttttgcgtgacccgccagtgcttcatccacactgttatcaatgacttcttgccccaaatggttagggcgagtggtatcggtatacatccccggacggcggcgaaccggctcaagcccggtgagtacctcaatggcatcagcgttataagtttgcgtcatggtttaagttagtaattcgagttgatcgtcagagatggtgcagaccaagaaaatcgacgatcgggttgaaataatcttcgaagcccgtgaatgcgtggttgccgccttctatgacagtctggcggcaggaagcgtagtacgccaccgcctggcggtaatccagcacttcatctcccgtctgttgcagcagccagatcaaatccggcgcttccagcgggtcaatctgcatgactttaagatcgtaaatatggcgactctctagcacatattgctgcccggtgtaggggttctcgttctgaccgagatagtccgtcagcagttcaaacgggcgcaccgccgggtttaccaccactgcgggcagcataaaacattgactcaaccaggtggcgtaatatccccccagactgctaccgacaatacccaggctatcaccgccatgttccaggacaatggattccagcagctctgccgcgtcggaaggatacggcggcaactgcggaatgatcatctcaacgtcagggtgatgttccgccagccagttttttaacaagctcgcttttgcagagcgcgggctgctgttgaaaccgtgtaaataaagaagcgtagacatcagtagccttcactagcggtatcaggttggaaacgtgtgtccgccaggcgatgcacctcggtggtcagcgtgccatcagcatgtaactcgagagtacgccagccgggcgcgatggtatccagcgtaaagttggaacagtgcggcttaaactgcacacaggtgctcggcgttgccagcaggcggcgaccattccagtcgagatccagctcctgatgaatatgaccgcacagcaagtatttgacgtgcggaaacttcgccagcacggtatccagttcgcccgcgttacgcagactgtgttgatcgagccaactacaacccgcaggtagcggatgatgatgcagcagcagcaacgtatggcgttctggcgcatcggccagtttacgttccagccactcaagctgaaactcgctcagctcaccgtgcggcacgccaaacacctggctatccagcaacaggatttgccattgctcaccaataaacacgcgcttcgccggggagatacccgcatcctgtaacgcgctgtacatcgcgggctggaaatcgtggttgcccggcagccagacgcagggcgcacgaaaacttgcgatgccttcagcgaaatgctgataggccgcagaggattgatcctgcgctaaatcacctgtcgcgacaatcaggtcgaattcgtgctggtgtggccgaatcgcctccagcaccgcctggtaactctcccaggtgtttacccctaacagggcttcgtgcttttgtgcaaacaggtgagtgtcggtaatttgtaaaatcctgactctggcctcaccagccagaggaagggttaacaggctttccaaatggtgtccttaggtttcacgacgttaataaaccggaatcgccatcgctccatgtgctaaacagtatcgcaaccagtccgctaaaaactgattaatttgatgcttttcgtcgcgttgatgcaactttttattaggataatcataccgcgctttgaagcgaaaaatctgctggctactacacacttcagccaccatcgcgtcatgatacagacgcaccgtcatactcggaaggctccagtaactgatcgcgggcgcagtctgttctattgtcaccagggtagtgtatcgggtgctttccacaatcgtcagccgatattgtgcgtttgccacctgatagcttacagtttcgccgggtgcgtcattgcgcggtaacaaacggcgcaattgactaaagttcatctcgcacaggcgcatcatttcaggaaagtcaggtgtgtaacgcttcatttatgcccactcattttttaacgcttgatgatgcagctgcagccattgcaaagcgatgacgctcgctgcgttgtcgattttcccctcttctacccactggtatgcctgttcccggcttaccacatgaacgcgaatatcttcgttttcatcagccagaccgtgaataccgcttgcggtcgtggcgtccacttcgcccaccataatactgctacgctcactggtgccccccgggcttgccaggaaacttaacaccggtttggtccgtttgactatcagtcccgcctcttcaatcgcttcgcgacgggcaacatcttccacactttcaccctcttcaatcatcccggcaaccatctccagtagccaaggggtttcgctggtgtcgtacgcggcaatccgaatctgctcaatcagcacaacttcatcacgcactgggtcaaagggtagcaagactgcggcgtgaccgcgctcaaaaatttcccgccgcacctcatgactcatttgcccgttgaatagacgatgacgaaatctataaagatctaaactaaaaaagccgcgataaagtgtttctcgtgcaataatttctacatcgtttttgccaaatgtaacgggcaggttgtctggcttaagcattgttaatgtcctggcactaatagtgaattaaatgtgaatttcagcgacgtttgactgccgtttgagcagtcatgtgttaaattgaggcacattaacgccctatggcacgtaacgccaaccttttgcggtagcggcttctgctagaatccgcaataattttacagtttgatcgcgctaaatactgcttcaccacaaggaatgcaaatgaagaaattgctccccattcttatcggcctgagcctttctgggttcagtagcttgagccaggccgagaacctgatgcaagtttatcagcaagcacgccttagtaacccggaattgcgtaagtctgccgccgatcgtgatgctgcctttgaaaaaattaatgaagcgcgcagtccattactgccacagctaggtttaggtgcagattacacctatagcaacggctaccgcgacgcgaacggcatcaactctaacgcgaccagtgcgtccttgcagttaactcaatccatttttgatatgagcaaatggcgtgcgttaacgctgcaggaaaaagcagcagggattcaggacgtcacgtatcagaccgatcagcaaaccttgatcctcaacaccgcgaccgcttatttcaacgtgttgaatgctattgacgttctttcctatacacaggcacaaaaagaagcgatctaccgtcaattagatcaaaccacccaacgttttaacgtgggcctggtagcgatcaccgacgtgcagaacgcccgcgcacagtacgataccgtgctggcgaacgaagtgaccgcacgtaataaccttgataacgcggtagagcagctgcgccagatcaccggtaactactatccggaactggctgcgctgaatgtcgaaaactttaaaaccgacaaaccacagccggttaacgcgctgctgaaagaagccgaaaaacgcaacctgagcctgttacaggcacgcttgagccaggacctggcgcgcgagcaaattcgccaggcgcaggatggtcacttaccgactctggatttaacggcttctaccgggatttctgacacctcttatagcggtagcaaaacccgtggtgccgctggtacccagtatgacgatagcaatatgggccagaacaaagttggcctgagcttcagcctgccgatttatcagggcggaatggttaacagccaggtgaaacaggcacagtacaactttgtcggtgccagcgagcaactggaaagtgcccatcgtagcgtcgtgcagaccgtgcgttcctccttcaacaacattaatgcatctatcagtagcattaacgcctacaaacaagccgtagtttccgctcaaagcagtttagacgcgatggaagcgggctacagcgtcggtacgcgtaccattgttgatgtgttggatgcgaccaccacgttgtacaacgccaagcaagagctggcgaatgcgcgttataactacctgattaatcagctgaatattaagagtgctctgggtacgttgaacgagcaggatctgctggcactgaacaatgcgctgagcaaaccggtttccactaatccggaaaacgttgcaccgcaaacgccggaacagaatgctattgctgatggttatgcgcctgatagcccggcaccagtcgttcagcaaacatccgcacgcactaccaccagtaacggtcataaccctttccgtaactgatgacgacgacggggcttcggccccgtctgaacgtaaggcaacgtaaagatacgggttatctgccgcattcttcccccttcagccttcaatttcgaccagccatcctctattctgatgggtatttaccactggtcccggaagacaaaaatgaaacggacaaaatccatacgccacgcatcgttccgcaaaaactggagcgcacgccatctgacaccagtcgctctcgcggttgccactgtttttatgctggctggctgtgaaaagagtgatgaaacagtgtctctctatcaaaatgctgacgactgtagtgctgcaaacccaggcaaaagcgccgaatgtaccaccgcgtacaacaatgcgctgaaagaagccgaacgtactgcgccgaaatacgccacccgtgaagactgtgttgctgaatttggtgaaggtcagtgccagcaggcaccagcccaggctggcatggcaccagaaaaccaggcgcaggcccagcaatccagcgggagtttctggatgccgctgatggccggttacatgatggggcgtctgatgggcggcggcgcgggatttgcacagcagccgctgttctccagcaaaaacccagccagtccggcttacggtaaatataccgacgcgacgggtaaaaactatggcgcagcccagccaggccgcaccatgaccgtaccgaagacggcaatggcaccaaaaccggcgaccaccactaccgttacccgtggcggttttggtgaatctgttgccaaacaaagcactatgcagcgtagtgcaaccggtacctcttctcgtagtatgggtggctgataccgatggaaagagtcagtattaccgagcgcccggactggcgtgagaaagcccacgaatacggtttcaattttcacaccatgtacggcgagccgtactggtgtgaagatgcttactacaagttgaccctcgcccaggttgaaaagctggaagaagtcaccgccgaactgcaccagatgtgcctgaaagtggtggaaaaagtgatcgccagcgatgagctgatgaccaaattccgcattccaaaacacacctggagttttgtgcgccagagttggctgacgcaccagccaagcctttatagccgtcttgatctggcgtgggatggcactggtgaacctaaacttctggaaaataacgccgatacgccaacgagtctatacgaggcggcgttctttcagtggatctggctggaagatcagcttaacgccggtaacttgccggagggcagcgaccagtttaacagtctgcaagaaaaactgatcgatcgcttcgttgagctgcgtgaacagtatggcttccagttgctgcatctcacctgctgtcgcgacacggtggaagatcgcggaaccattcagtatttgcaggactgcgcaacggaagctgaaattgctactgagttcctctacatcgatgatatcgggttaggtgaaaaaggtcagttcacggatttacaggatcaggtaatttccaacctgttcaaactgtatccgtgggaatttatgttgcgtgagatgttcagtaccaagctggaggatgcaggcgtacgctggctggaaccggcgtggaagagcattatctccaacaaggcacttctaccgctactgtgggagatgttcccgaatcacccgaacctgctgcccgcttattttgcggaagatgatcatccgcaaatggaaaaatatgtggttaaaccgatcttctcccgtgaaggcgcaaacgtgagcatcattgagaacggcaaaaccattgaagcagcggaaggtccgtatggcgaagaagggatgattgttcagcaattccacccgttaccgaaattcggcgacagctatatgctgattggtagctggctggtgaacgatcaacccgccggaattggcattcgtgaagaccgtgcattgatcacccaggatatgtctcggttttatccacatatttttgttgaataagccacgataccggatggcactcgccatccggtaattgttagcctatctgcacgctcagcatactcaggctgcccatttctataccctcaaccggaatggtaattggctcctgcccatcccacgcacctaacacatacaacaacggcaaataatgctctggcgttgggttgcttaacgtgccaccttcatggtcgaggtaattcaccagaggatgttgttccactggcccttgccacgtcagattcgctttcacatactcattaaagctcgtcgcccacggatacggactactatcaccgtgccacttcactgtgcgcaggttatgcaccacgttaccgctggcgaccaacattattccttcatctcgcagcgctgccagtttgcgccccatttcgaaatgccaggcggcaggtttgctactgtcgatactcaactgcaccatcgggatatcagcgtcaggatacatcttaatcagcacgccccagctgccgtggtcaaagccccaggcttctttatccagcgtcaccgggatcggcgctaacagctcaaccagacgctgtgccagcgcagggctacccggagcaggataatgcgtatcgtacagcgcctgcgggaagccaccaaagtcatgaatcgtgggcggcgtctccatcgcggtcactcctgttccacgggtaaaccagtgagcgctaaccaccacaatcgcttgcgggcgtggcaatgtcatccccaacttctgccagctgcgggtatacaaattatcttccagcacgttcatcggactaccgtgacctaaaaacaatgctggcatacgtgtactagacatgatgatatccttaactaaaggtgtcattttgatatcctcacaatacgcttgttcggcggagtaagaacccggataacaatgatgatgatcatcagttattttgacgatctgcctgaaggtgaagatttataaggagttgtcgatgagtgtacctctcattctgaccatactggcgggggcagccacgtttattggcgcgtttctcggcgttctcgggcaaaaacccagcaaccgcttactggcgtttagcctaggttttgcggcggggatcatgttgctcatcagtttaatggaaatgcttcctgccgcactagcagctgaaggaatgagccctgtgttgggttatggaatgtttatcttcggtctgcttggctattttggcctggaccgcatgttgccacatgctcatccgcaggatttaatgcaaaaaagcgtgcagccgttgccaaaaagcatcaagcgcacagccattctgctcactctcggcatcagtctgcataacttcccggaagggattgccacctttgtcacggcgagcagcaacctggagctgggatttggcatcgcactggccgtcgcgttgcacaatatccctgaaggtctggcagtggcaggcccggtttatgcggcaacggggtctaaacgcaccgcgattctgtgggcggggatttctggactagcagaaattcttggtggtgtgctggcgtggttaatcctcggtagcatgatttccccggtggtcatggcggcaatcatggcggcggttgcaggaattatggtggcgctcagcgttgatgaattaatgccgctcgccaaagagattgaccctaataataaccccagctatggcgtactatgtggaatgagtgtgatgggattcagtttagtgctgctacaaacggcgggaattggttaaaaacaacatcagaagttgtccagcgcatggacaacttctgccagcttcacgaaagccttattctaccttttcggctgtctcttctctcgtactgtttaagtatttgttccgcgcttcaagcagtgcgtctctgtcctggcgaaacgcccgacaataacgtttcaaatgcaggaaataacccaccacaaccagagcaatcaatacaatccagtaccaggcgataaacatccttttacccttaatatttaacaatactaaacatttagcgtataaatttcacatatcctttttcggatatattcatatggtcgcataataacggaacaattatatgattttgatcataatgaaaaagaatgcctgatattaatgaaattttctcatagaaagagaagcggaattaacatcttgcatagcagggaaaaataaaaaccgaagcctgctacaacttcggtttcttgattaaggcagtaaattaagcagcggttttcagctggctttacgctcatgtgcctgacggtatgccaccaggtcttcaatagtcacgagcgccatattgtgtttattggcaaactcaatacactctggtgcacgcgccatcgtgccatcgtcattagtcagctcacacagtacaccagccggtttaaagcctgccagcgtcatcagatcaatagttgcttcagtatgaccgccacgcgtcagtacaccacctgcctgagcgcgaagtgggaaaacgtggccaggacgattcagatcactcggttttgcgccatcggcaatcgctgcgcgaacggtcgtaatacggtcagcggcagaaacaccggtagtcacaccttcagctgcttcaatggtcacggtaaaaccggtgccataggcgctggtgttattttctaccatcattggcagatcgagttgtttacggcgatcttcagtaatgcacaggcaaacaataccgctaccgtggcgaatggtcagcgccatctgctcaacagtcatggtttctgccgggaagatcatatcaccttcgttttcacggtcttcatcatcaagcaccattacaccgcgtccttcacgcagcgcagccagtgcattttcaacacgttcgaaaggcgtaccaaaagaggaaagtagcgtctgattcatggtaaaaaaacctcactaaaattatggttaccagaatcagggcagtcttaggagtggcggcatatagccaaaataacgtgagcgggtccatgcccgacagaatcgttactctctcccatccggactctaaccgtcggccccggaattacaccggatctgctgtcctttgagttcgcacccaaagcgctcgcgggctttcaactgagttgatttaccgccggtggggaatttcgccccgccctgagaataagcggattcactataacgctaatgattagcggcagcaacgcatagcttcacataattctggtttatatctaatacaaacactaaaacgggccatcaggcccgttatatcagtgctctaactccagctctcttgcctgcatcatctgttgacaataccaggcataacgtgcgcaaaaccaggttctatgttcttcatccatgttaccagtaacggccagaatatcgaccgggcgaccttctgcgtgcattctggcaaaactacgcgccaggaaatcgaaattatttaaagaattaagactatgatccataagcacatcctccggttatcgcataccttttaaggccatatgctttttctgatttcagtattccccaatcagtgtagtgcctttaaacataacgtgcgtaaatatattgtccccgatcacactttttagtgaaaaataaaaaaccatattaaaagactttctcttccagaacttctctaacctgtgttattattaacacagataaatgtaagcaaggaaactattacaaagtaaatattgcgtcactaaatggacattggagtgatatatgattttattcgccgactataacaccccttatcttttcgctatttcctttgtactgttgatcggcctgttagaaatttttgcgcttatctgcggtcacatgctctccggtgctcttgatgcacatcttgaccattatgattctataaccacaggtcatattagccaggcacttcattatctcaatattggaagattgccagctctcgtcgttctctgcttactggctggtttttttggtcttattggcatcctgttgcagcatgcctgcatcatggtctggcaaagtccactgagcaacctgttcgtggttcctgtcagtttactgtttacgattattgcggtgcattataccggtaaaatagttgcgccctggattccacgcgaccatagtagtgctattacagaagaagaatatattggtagcatggcgttaattaccggtcatcaagccactagtggtaatccctgcgaaggaaaactcaccgatcaatttggccaaatacattatttactactggagcctgaagaaggaaaaattttcactaaaggagacaaagtgttaattatttgccgactttctgcaacgcgatatttggcggaaaataatccctggccccaaatattgtaatttattaatcaaaaggaaatttaataatggatgatattgttaattctgtgccctcctggatgtttaccgcaattattgccgtatgcattctgtttattattggaattattttcgccaggctctatcgtcgcgctagcgcagagcaagcttttgttcgtactggtttaggtgggcaaaaagtggtaatgagcggtggcgcaatcgtgatgccgatctttcatgaaataatccccatcaatatgaatactctgaagctggaagtcagccgcagtaccattgatagcctgattacgaaagatcgtatgcgcgtcgatgtagtagtcgctttctttgtgcgggtaaaacctagtgtagaagggattgccaccgctgcccagacgctggggcaacgcaccctgagccctgaagacttacgtatgttggttgaagataaatttgtcgatgccctccgtgcaacagctgcgcaaatgaccatgcatgagttacaggatacccgcgagaactttgtgcagggggtgcaaaatacagtggcagaagacctgagcaaaaacggtctggaactggagagcgttagtcttaccaactttaaccagaccagcaaagaacatttcaatccgaacaatgcctttgacgccgaaggtttaaccaaactgactcaggaaacagagcgccgtcgccgcgaacgtaacgaagttgaacaggatgtagaagttgcggtgcgtgaaaaaaatcgcgatgcgctaagccgcaagctggagattgaacagcaagaagcgtttatgacgcttgagcaggagcagcaggttaaaacccgtactgccgaacagaatgcacgtattgcggcttttgaagctgaacgtcgtcgtgaagcagagcagacacgaattctggctgaacgacagattcaggaaacagaaatcgaccgcgaacaggccgtccgcagtagaaaggttgaagctgaacgtgaagttcgcattaaagagatcgaacagcagcaggtcaccgaaatcgctaaccagacgaaaagcatcgctattgccgccaaaagcgaacaacagtcccaggcagaagcgcgtgctaatctcgcacttgcagaagcggtaagcgcccaacaaaacgtagaaaccactcgccagactgccgaagccgatcgtgctaaacaagttgccctaatcgctgccgcgcaggatgcagaaaccaaagcggttgaactgaccgtgcgggcgaaagcagaaaaagaagccgcagagatgcaggcggcggctatcgttgagttagccgaagctacacgtaaaaagggtctggcggaagcagaagcacaacgtgcgctgaacgatgctatcaacgtactttctgatgaacaaaccagccttaaattcaaactggccttgttgcaggcgctgcctgcggtaatagagaaatccgttgagccgatgaagagtatcgacggtatcaagattattcaggtcgatggtctgaatcgtggcggcgctgcgggtgatgcaaacacgggtaatgtggggggcggaaacctggcggaacaagcattaagtgccgctctctcttaccgcacacaggcaccgctgattgactccttgctcaatgaaattggcgttagtggcggcagtctggcggcattgactagtcccttaaccagtacaactcccgtcgaagaaaaagcagagtaaaccctcttccaggaataatccctggcccaaaaagccggggattttttatatctgcgttccgctaaaaagtgcaaatgatcaggttgttgcagcattttgcgtgacggctcggggaaggcaaaactgcatcagagaaagcattgcgtggggtctggcgctcatcaacaatcggggagtcagcagggggctgaaacgggaaagcccctcccgaagaagggggccttacagaaggaaagggttatgatgaagctcgtcatcatactgattgtgttgttactcgtaagtttcgcagcttattaacagccaatcagaggggggagaaatcctccctcacccttgttcctttactttaggttgaaaaaaaatcagcgtcaagaaggtttcattaacacatatccctggcccaaaaagccggggattttttatatctgcgttccgctaaaaggtgcaaatgctcaggacgttgcagcgttttgcgtgaccgctcggggaaggcaaaattgcctctgggaaagcattgcgcggggtccggcgctcatcaacaatcggggggcagcaaggggctgaaacgggaaagcccctcccgaagaaggggccttgtataaggaaagggttatgatgaagctcgtcatcatactggttgtgttgttactgttaagtttcccgacttactaacaactcatcagaggggggagaaatcctcccttacccttgttcctttactctaggttgaaaaaacaacagcgtcaataggcctgccatgtacgaagcgagatctgtgaaccgctttccggttagccttttttatcctgttggatcttcttgatgatgttggtcgtgctgcaaccgtcttcaaagttgagcaccaacacttcgccaccgttggcccagacttctttactcccggcaatctcttctggtttatagtcgccgcctttcaccagcagatctggcaagatcccggcgatcaagcgctgcggcgtgtcctcttcaaagctcactacccagtcgaccgcttccagtgcgcccagcacaatcatacgctgttcgagtgggtttaccgggcgggaatcccctttcagccgtttggtggaggcatcgctgttgacggcaacaatcaagcggtcacccagcttgcgggcatttgccagataagagacgtgcccggcgtgcaggatgtcaaagacaccgttggtcatcaccactttttcaccacgtttacgcgctgccgctacggccagcttcagttcctcttcggtcatcacgccaaagcctgtatctgcacgtccacgtacagcattttccagctcgatcgggctaaccgtggaggttcccagtttgccgaccaccacgccagccgccgcattggcaaagaagcaggcttcttccaggctattacccgctgccagcgttgccgccaggacgccaatcaccgtgtcgcccgcaccggtaacgtcatacacttcctgcgcttgggttggcatatgcagcggcgctttacccggttgcagcaggctcataccctgttcggaacgggtcactaacagagcgctgagttcgtaatcggcaatcagtttcatgccgcgctcaacaatctcttcttcggtcttacatttaccgacaacagcttcaaattcgctgagattcggcgttaacagcgtagcgccgcggtagcgctcaaaatcggtaccttttggatcaatcagcaccggaacacccgctttacgcgccagttggatcatctgctgtacgcttgccagcgcacctttggcgtagtcagaaagcaccagcgcgccaatgctactcagcgcctgattaatccgctcgtgcagcggctgcggatcaacaccttcgaaaccttcttcaaaatccagacggatcagctgttggttgcgggaaagtacccgtaatttggtaatggtcggatgcgtcggtacagaaacgaagtcgcatttgacgttgacgtcggccagagatttactcagcgcgcgcgctgcatcgtcaatgcccgtcaacccgaccaggcgtgcattagcaccgagagaagcgatattcatcgccacgttagccgcgccgcccggacgttcttcgatggtattcactttaaccacgggcaccggcgcttccgggctgatacgactggtggggccgtaccagtaacgatccagcatcacatcaccaaccaccatcactcctgcacgttcaaactctggcagcgttactttcattcctgtctcctgagagattcaaaatttgcgcgcgataataccatacttcattcttccaccagccacttctgccagcttgcccgcaccagttcacgctctgcggtgaagcaatcctcgctcacatggcccggcaattcctgtaatgccagatgatgaagttcatcgcgaagcgtagtgtaagcacgggtcagcgccatcgcttcctgctcttccataatgtcgttttgcgccagtagttccagaatacgcacgttgtcactccagcgcgttaacttcggtttttcatgagcgtagcgcaacaccagatattgggtaataaattcgatatcggtaattcccccttcatcagctttgatatcaaagcgatcgcgatgtttattgccgagatgagcgcgcattttctcgcgcatttcccgcacttccgtttgcagagttttaccttcacgcggcagcgtcataatctcgcgacgcactgcgtcaaagtgcgcggtgagctgcggatcgccgtacactacacgcgcacgcaccagcgcctgatgttcccacgtccaggcctcgtttttctgataatcggcaaatgcttctgcggatgtcaccagcattcccgccgccccggacggacgcagtcgagcatccacttcatacaaaatgccggaagaggtacgcgtactgaacagatgcataatgcgttgcgccagacgcagataaaactgccgcccgtcgatttcccgctcaccgtcagtcatcgcatccattgggcaatcatggaggaagataaggtcaagatcggaactgtagcctaactcccagccgcccagcttgccgtagccgaccaccgcaaaaccacgcccttcgcgttcgttcaggtgattcggcttaccgtagcgggcaaccatttgaacccacgcctgctgaacgacggcatctatcatggcttccgccagccaggttaagtgatcgctcactttcatcaccggtagcgtaccggcgatatccgctgcggcgatgcgtaacagctgcgcctgtttgaactgacgcagcgcctcaagctgttgctcttcgtcatcttccggcacgcgcagcaaatactggcgcaactcatcgcggtaggcatcggtcgccgtcggctggtaaagggtgtttggatcgagcaattcatccagcaataatggataacgcgccagctggctggcaatcatcgggctcgcggcacacagagaaatcaaatgtttaagcgccgcggggaattcactgagcaattctaaataggtggtgcgggtaacaatccccaccagcaaggcggtaatgcggctcagcgtaacggcagcgtcttcacgcgcacagacatcacttagcagatgcggcatcagatggtcgagcacctgacgtcctcgcggcccgatggtgcgcttatccagctctttgcggaaatcggcaatcagcgttagcacctgtttgcgatcatcctcgctaagatgcgccagcactggcgtagtgtcatcttcctgcaacgcatcctgccacagctcacgccactgttcgctcaggctctcttcctgagtttcactttcatcgtcgccaatcaattcattaaacacccggcgcacattggtcatatgtgcggtcagcgccccggtcagttgcggccagtcagcaaagtccatcgcccacgccagccgcgcacgattaagctcatcagaaggaagcgtctgggtttgttcgtcgttaatgctttgcagcaggttttccagacgccgcaggaacagatacgccactcgcaattgttcagcatcgttttcagaaagcagatgcagctcggcaatggcgctgagcgttggcagtaaagagcggctttgcaggctcggttcgcgtccgccgcgaatgagctggaacacctgaacgataaattcaatttcgcgaatgccgcctgcgccgagtttgatattgtcggtcaaaccacgtcgacgcacttcacgggcaatcatccctttcatgttgcgcaggctctgaatcacgctgaaatcgatgtaacgacggaaaacaaacgggcgcagcatcgcacgcaactcgttagcatagacgccttcgctatcgcccataatccgcgccttgaccatcgcgtaacgctcccagtcgcgcccctgctcctggtaataatcttccaacgcggcaaagctcagcaccagcgggccactttcgccaaacggacgcagccgcatatccacgcgatagacgaagccatcctgcgttggttgatccagcactttaatcagccgctgccccatgcgggtaaaaaactgcgcgttatccagttcccggcgtccaccctgcgtacaaccatgttccggccaggcaaaaatcagatcgatatcagaggagaaattcagctccccaccgcccagcttacccatgcctaaaatcagcagcggttgcgcttcgccctgcgcattgcacggcgttccccactcgcggcagcaggcgtcatacagccagtcacgcgccgcaacaatcagcgtctccgccagatagctgagctgctgcaatatgctctcttcagtaaccagtgccagcgtttgcgcccaggcgatgcgcaccataatgcgccgccggaatagccgcagctcgcgcattaacccggcttcgtcactcacattacagagcgcctcctgcaaccatgccgcgtaatgctgccattcgtcggcctgcggcggttggctttccagttccgtcagccactctggatgcgcaatcacgctgtcctgcacaaaatcactaaaagtaagtacactcttcgcctgtgcgctaagactttcctcggctaaaggctctggcagccgctcaacaacggtctgccagtactgctgtaacggactagagagcggcttcataagcgattttatccttgcctgattaacgttttccgctgtgcaaccagaacggttcctgattgtttgcctcattacggaaatgttcaatttcgatgcgttgcccggtcgcaatagcgtgatgcagcccctgccagttctccagccaggcttgcgcgacgacaggatcatagtaacccgccagcaacagtatactgtcaatatcacgcgtcaggcgtggcaactggtcacggtagcgatcgcctaacggctggcagaaaacgcttttcagttcagcggcatggcgggaaagatggatatcggcaaagcgtttgaaggagtcgctgattttgccctgcgctttggcatctaaaaatggctgccatgctttgcttaccaaccattcggtcaacgccagcttcgccattgccgtttcggtagagtagaccgccgtcacggcagacaccgcagaagcaatggtcgcctcgcattgagtcagcagatcacgtaagtgagtgctcgctttacgcggcacaataccaccgaacagcatcagcgtatgacggaccaggctaatggctgccagcacctgttctttcgccgcatcgttgccgcgtacccacagttcttcatgatactgccattgcgctaacgccagctcgagcgccgcttccagcccctgttccacatcggcttttgccgcaacatgcaaaatggtggtcggtttgatttcacgcgccggattgccctgcgccagatgatagccacgcgccgctttgctcaggctgccctggcgtaatccggtttggcttaccagttggttcgccagtttcagcaccgcgcgcgtgtcgccgctaagcagttccagttccagctcacagataggttcagcaaattcacccgctttcacttccccctggtcgagggcgatttcaatttggctaccatcgaccgccaccagccatttttcgcgataaaaatcggtgctgaacagcggctgcacgcgggaggcgagatcggcgggcaattcgccgttcggccagacttccgtcggtaactgcgccaggtcgagcgtcggttcgctcaacgccacgttatattccgggcgctgatgtaagccgcctgtcactcttcctgcaactttcatggtcatctcatagcgaccgttttcgccacgaatacgtaagcccatatcgtgcccacgcagccagttatccggcgtttcgtagtaaatattcagcaactgcacggggtcatggtgctcgccgcccagcgtattgagatggtcacgcaacgcctcaacggcactgtgattaacaataaactttaattcgatttcctgagccatggcctttacttatcggttatgtcacataagtgacgatgaacggcgaacttaatgcgatcttttttgtcagtagatagtattttgcgccaaattgccatgcaacgggcaatttgacgggcgtaaaagtttgaagcagtggcaagacctgacacagaggattccgattgatgtcgaatgctttgcgtagcgacactgatgccactactatcgttccactttccatgacaataacgacagcctgatgccaaaattacgcctgatcggattaactttactcgcacttagcgcgactgccgtcagtcacgctgaagaaacgcgctatgtttccgacgaactgaatacctgggtccgcagcggtccgggagatcattatcgcctcgtgggcacggttaacgccggcgaggaagtgaccttattacaaactgacgccaacaccaattatgcccaggtgaaagacagctctggccgtaccgcctggatcccgttgaaacaacttagcactgagccaagcctgcgctcccgtgtgccagatctggaaaatcaggtcaaaaccctgaccgataaactcaccaatatcgataacacctggaatcagcgcaccgcagaaatgcagcaaaaagtggcgcagagcgacagcgtgatcaacgggttaaaagaagaaaatcagaaactgaaaaacgagctgattgtcgcgcagaaaaaggtcgatgccgccagcgtacagctggatgacaaacagcgcaccatcatcatgcaatggtttatgtatggcggtggcgtgctggggcttggcttgctgctcggtctggtactgccgcacctgatcccaagccgcaaacgcaaagatcgctggatgaactaaatcgccttcttcgttgcactgtcttattattaggaattgtgtatttgacgaagggatgatggcgtgaagatttatctggtcggtggtgctgttcgggatgcattgttagggctaccggtcaaagacagagattgggtggtggtcggcagtacgccacaggagatgctcgacgcgggctaccagcaggtaggccgcgattttcctgtgtttctgcatccgcaaacgcatgaagagtatgcgctggcacgtaccgaacggaaatccggttccggttacaccggttttacttgctatgccgcaccggatgtcacgctggaagatgatcttaagcgtcgcgatctgaccattaatgcgctggcccaggacgataacggcgagattatcgacccgtacaacggtctgggcgatctgcaaaatcgtctgttgcgccatgtttcccccgcttttggcgaagatccgttacgcgtattgcgcgtggcgcgttttgctgcgcgttatgcccacctcggttttcgtattgccgatgaaactctggcgttgatgcgcgagatgacccatgcgggtgaactggaacacctgacgcctgaacgggtatggaaagagacggaaagcgccctcaccacccgcaatccacaggtgttcttccaggtactgcgcgattgcggcgcactgcgcgttttattcccggaaattgacgcactgtttggcgttccggcccctgccaagtggcatccggaaatcgatacgggtattcataccttaatgacgctcagtatggcggcgatgctgagtccgcaggtcgatgtccgtttcgcaactttatgccacgatctcggtaaagggctgacgccgccagaactctggccgcgtcatcatggtcatggcccggcgggtgttaagttagtggaacaactatgccagcgtctgcgcgtgccaaatgaaattcgcgatttagccagactggtggctgagtttcacgatctcatccacaccttcccaatgctgaacccaaaaaccatcgtcaaattatttgattccatcgatgcctggcgtaaaccgcagcgtgtcgagcaactggcgctgaccagcgaggctgacgtgcgcggcagaaccggttttgaaagtgcggactacccgcaaggccgctggttgcgcgaagcctgggaagtggcgcagagtgtgccgacaaaagccgtcgttgaagcgggatttaaaggtgtggagattcgcgaggagctgacccgacggcggattgcggcggtagccagctggaaggaacaacgttgcccaaagcctgaatgagtattgggcattttgccggatgcggcgtaaacgccttatccggctacatgtcaacgacagttgtaggcctgataagacgcgcaagcgtcgcatcaggcgttgattgccggatgcggcgtgaacgccttattcggcctacgcaatcgttgacaacgccaagcatccgacactattcctcaattaaaagaacacgacatacaccgcagccgccacaataaagcgataaatggcgaacgggataaagctaatgcgcttaatcaattgcaggaaggttttaatcgctatcagcgccaccacaaaagcggtgataaacccaacggcaaacatcgggatatcgccgcttgtcaggaagccccagcttttgtagagatcgagcgccgttgcgcccatcatcatcggcaccgccagcaggaagctaaactcggaagcagcgtaacggctcacccccatcagcatcccaccactaatggtcgccccggaacgggagaaacccggccacagcgccagacactggaaacagccaatcataaatgcctgacgataggtcatatcatcaagacccggcgcacgcggctctttcggcttcaggcattcggcggcaatcagcaacaaaccgccaacgaccagcgcatacatcacatttatcgggttaaacaaactcttaatcgtgtcgtggaacaacagccccaataccaccgccggaatcatccccagcaaaatgtggatcagcgttaaacgacctttgctttcaccttcgtgctgcaacgggcggccaaagtggatgccaatcaggccaaacagacgccgccagaacatcactactaccgccagaatacttcctaactggatcacaacttcaaaggttttcgccgtgtcgccctcaaaccccaacaagtgaccgacaataatcatatggcccgtgctggataccggcagaaattctgtcaatccttcgaccacacccaatattgccgctatcagcaggctgtgcatatcgctcatcaataaacccctaaattattaaaatgtaccgcttgtccgaactactgcgtatgaccaggttataaccgtttggtttaacagctgtaaaattaattattttctttcagattattgccacgctcaatgattacgccaacattcgccgcccgcgccactgcgcctggcttgctgagtttgatacgcacccacgggctgttgaagcgtgctaacagcagctccgccacctcttcagccacgcgttccaccagcgcaaaacgcgccccctcgacgtggctgaccaccgtttctgcaatgtcagcgtaactgaggcaatccgccacatcatcacttttcgccgctttacggttatcccacgccatttcgatatcgaacactaacttctgttcgatggtctgttcccagtcgtaaacaccaatagtggtgattacgctaagttgctctataaatacaatatccatcacgtcctgcctgctttttggctaaccggataccacttccggcgaaatgtgcgtattatccacagattcatcgttgaacacgaattttcaaaacggaacagcttatgagtgcaatcgcgcctggaatgatcctcatcgcgtacctctgcggctccatttccagtgccattctggtttgccgcttgtgtgggctgcccgatccgcgaaccagcggctccggcaatccaggcgcaaccaatgtgttacgtatcggtggcaagggagcagccgtagcagtactgattttcgacgttctgaaaggaatgttgcccgtctggggcgcgtatgaattaggtgtcagccccttctggctaggcttaattgccatcgccgcctgtcttggacacatctggcccgttttcttcggatttaaaggaggaaaaggcgttgctaccgcttttggtgccatcgcacccattggctgggatctcaccggagtaatggcgggaacctggttactgaccgtgctattgagcggatacagcagcctgggagcgattgtcagtgcactgattgctccgttttatgtctggtggtttaagccacaattcaccttcccggttagcatgctctcttgcctgatcctgctgcgtcatcatgacaacatccaacgtctgtggcgtcgtcaggagacaaaaatctggacgaaattcaaaagaaagcgcgaaaaggatcccgagtgatttctggtggatttacatgacctgatagccttcatcgggcttgcccagccgttgctggcaccatgccgccagaaattccacgcagacacgtaatttcatgctgcgatagagcggctcccggtaaacagcccagatattggcgctttgtgcatactctggcaatacttgcaccagtttgccactctccagaaacggcaacacatcccactcggaacgcagcataatccctttaccctccagcgcccattgcagcacaatctcgccgctattggaggaaagatgcccgcttaccttcacgctttttttctcctgaccgttccccaactcccatattccatgggtcatatcgcgctctttggtcaccagacagtcatgacgacttaattcctgtagggattgtggctgcggatatttttgcagatactcaggtgctgcgcataatattcttttattttttgtcaaaagatgcgcaatataataatcaggaatttcgtcattaatacgaatatccagatcaatattatcctgcactaaatcaatttgccgatcgaacaattcaaaatgcacctgtaactcaggataattgcgcatcagttcggtaatagctggcgcaatatggctgcgcccaaaaccaaaactgcaaccaatacgaatcatcccctccgggcgcgttttgatttgcgtgacgtcatcgaccagtcgctgatattgggtgaggatttccaacgcatgttcgtaacaacgttggccactttcagtcagcgccacgccgcgagcggagcggttcagcagcgttgttgccagcgtattttcaaggatttggatccgcttggtgacaaatgcaggcgtctgcccaagcgtcgccgctgcggcgctaaaactcccgctgtgaacgatttctaccagtacctgcaagtctttggctaaaggccagctattcagcatcgttaattatccgcagttgtgataagcgcagtgtatttcgcaaaacattgccattccctgctctggcgcaatattcattcttattttcgcgttgattcacgaactgttaattacatattcacggtggcaaaaaatataaaaccacatttttagtggtagtttgtggcggtgaatttttccagacaaatacaaaaactggagttgccatgatgagcgaaagtaataagcaacaggcagtgaataagttgacagagattgtcgctaactttaccgccatgatttctacccgaatgcctgatgacgtggtggataaactaaaacagctaaaggatgccgaaacgagcagcatggggaaaattatctaccatacgatgttcgacaacatgcaaaaagcgattgacctgaatcgtcctgcctgtcaggacaccggggagattatgttcttcgttaaagtcggttcccgcttcccactgcttggcgagctgcaaagcatactcaaacaagccgtggaagaggcaaccgtcaaagcgccactacgtcacaatgcggtagaaatttttgacgaagtaaacaccggcaaaaataccggtagcggcgtaccgtgggtcacctgggacatcatccccgacaatgacgatgcggaaatcgaagtttacatggcaggcggcggctgcacgctacctggccgcagcaaagtgttaatgccgagtgaaggctacgaaggcgtggtgaaattcgtcttcgaaaatatctccaccctcgccgtaaacgcctgtccaccggtactggtgggcgtgggcatcgccaccagcgtggaaaccgccgccgtactcagccgtaaagccattttgcgcccgattggcagccgccatcccaatccaaaagcggcagaactggagctacgcctggaagaaggactcaaccgtctggggattggtccacaagggctgaccggcaacagtagtgtgatgggcgtacatatcgaatctgccgcccgccatccgagtaccatcggcgttgctgtctctaccggctgctgggcgcatcgtcgcggcacgctgctggttcatgccgatctcacctttgaaaatctgtctcacacccggagcgcgttatgaaaaagatcctgacaaccccgatcaaagctgaagatctgcaagatattcgcgtcggcgatgtgatctacctgaccggtacgctggtgacctgccgcgacgtttgtcaccgccgtttgatcgaactgaaacgtccgatcccttacgatctcaacggcaaagcgattttccacgctggccccatcgtgcgcaaaaacggcgacaaatgggagatggtctccgtcggcccgacaaccagtatgcgtatggaaagttttgaacgtgaatttattgagcagaccggcgtgaaactggtggttggcaaaggtggtatggggccgctgaccgaagaaggctgccagaaattcaaggcgctacatgtgattttcccggcaggctgcgcggtgctggcggcaacccaggtggaagagattgaagaagtgcactggacagagctcggaatgccggagagtctgtgggtctgccgggtcaaagagttcggcccgctgattgtctctattgatacccacggcaacaacctgatagccgaaaacaaaaagctgttcgccgaacgccgcgatcccatcgtggaagagatctgcgagcacgtccattacatcaaataaccctcccggagaggctcacccctctcctttttcgcaggcataacacgatgaaaccttccactgaatggtggcgatatcttgcgccgctggcggtcatcgccattattgctctacttccggttcccgcagggctggagaaccatacctggctctactttgccgtttttactggcgtgatcgttggactgatcctcgaacccgtgccgggtgccgtggtggcgatggtgggtatatccatcatcgccatactctctccctggctgctgttcagcccggagcagctcgctcagccaggctttaaattcactgcaaaatccctcagctgggccgtttccggtttttctaatagcgttatctggctgattttcgccgcctttatgtttggcacaggctatgaaaaaaccgggcttggacgccgcattgcgctgattctggtgaaaaagatgggacatcgcacgctgtttctcggctatgcggtgatgttctccgagctgatcctcgcacctgtaacaccgtccaacagcgcgcgtggtgcggggattatctatcccatcatccgtaacctgccaccgctctatcaaagtcaaccaaacgacagcagtagccgcagcattggcagctacatcatgtggatggggattgttgccgactgcgtgaccagcgccattttcttgacggcgatggcaccaaacttgctgttaattggactgatgaaaagcgcatctcacgccacgctgagttggggcgactggttcctcgggatgttgccgctcagcattttactggttctgctggttccctggctggcttacgtgctgtacccgccggtactgaagtctggcgatcaggtgccgcgctgggcagagacggaactgcaggcaatgggcccgctctgtagccgtgaaaaacggatgctggggctgatggtaggcgcgctggtgctgtggattttcggcggtgattatatcgatgccgcgatggtcggttacagcgtggtggcactgatgctgcttctgcgcattatcagttgggacgacattgtcagtaataaagcggcgtggaacgttttcttctggctggccagccttatcaccctcgccaccggactcaacaacaccggttttattagctggtttggcaaactgttagcaggcagcttaagcggttatagcccaacgatggtgatggtggcgttgattgtggtgttttatctactgcgctactttttcgccagcgccacggcgtatacctccgctctcgcaccgatgatgattgctgctgcgctggcgatgccggaaatcccgctgccggtgttctgcctgatggttggtgcggcaattggtctggggagcattcttacaccatacgccaccggccccagtccgatttactacggcagtggttatctgccaacggcggattactggcgactgggggcgatttttgggctgatattcctcgtattgctggtgattaccggcttactgtggatgcccgtggtgttgctttaagtgaggacggtgccggaaattgctctccggcacccaatagttttacgcagccggtaactccgccagcggccagcgcggacgcacgctaacgccgagatccgccgtcgcgcctgctttaaaccgcaccattccggcataggcgatcatcgcgccgttatcagtacaaaattccggacgcgcgtagaacacttcgccgcggcgttttttcatcatttcagccagcttcgcccgtaacgtacggttagcactcacgccgcccgccatgaccagtcgcttaaagcccgtctgacccagcgcccgcttgcacttaatcatcagcgtatcgaccaccgcatcttcaaaggcgcgggcgatatcagcacgcgtctggtcgtcggtgccgttgtcacgaatggtatttgccgcgaaggttttcaggccggagaagctgaaatccagccccggacggtcggtcatcggacgcgggaagacaaagcgcccggcagtaccctgagccgccattttgctcagtaacggcccgccaggataatccagccccagcagcttcgcggttttatcaaacgcttccccggcggcatcatcgatagactcgccgagcagctcgtactgaccaatgccagtcacgctgattaactgcgtatgaccgccggaaacaagcagcgcaacaaacggaaattccggcgggttatcttccagcatcggcgctaacagatgcccttccatatggtgtacagggatcgccggaacgtcccaggcaaacgccagagaacgccccacggtcgcgccaaccagtagcgcgccgactaatccagggcctgcggtataggccacagcatcaatgtcttttgccgttaaaccagactcctttagcgccgcctggatcaacggtacggttttacgcacatgatcgcgggaggccagttcaggcacgacgccgccgtagtcagcgtgcaatttcacctgactatacaattggttggctaacaaacctttttcatcgtcgtaaatggcgatgccggtttcatcgcaggaagtttcaatacccagtacacgcatgacttgttttacctcgctttattaccgcgcagtgtaggaccaatgcgggttgatgtaaaactttgttcgcccctggagaaagcctcgtgtatactcctcacccttataaaagtccctttcaaaaaaggccgcggtgctttacaaagcagcagcaattgcagtaaaattccgcaccattttgaaataagctggcgttgatgccagcggcaaaccgaattaatcaaaggtgagaggcacatgccggtaattaaagtacgtgaaaacgagccgttcgacgtagctctgcgtcgcttcaagcgttcctgcgaaaaagcaggtgttctggcggaagttcgtcgtcgtgagttctatgaaaaaccgactaccgaacgtaagcgcgctaaagcttctgcagtgaaacgtcacgcgaagaaactggctcgcgaaaacgcacgccgcactcgtctgtactaattccccgagagcgttgctctccgatcagaccgagttgtagttgtaaggccgtgcttccgaaaggaatgcgcggcttattttcgtttatgaattgctaaaaatcggggcctatggctggacgaatcccacgcgtattcattaatgatctgctggcacgcactgacatcgtcgatctgatcgatgcccgtgtgaagctgaaaaagcagggcaagaatttccacgcgtgttgtccattccacaacgagaaaaccccgtccttcaccgttaacggtgagaaacagttttaccactgctttggatgtggcgcgcacggcaacgcgatcgacttcctgatgaactacgacaagctcgagttcgtcgaaacggtcgaagagctggcagcaatgcacaatcttgaagtgccatttgaagcaggcagcggccccagccagatcgagcgccatcagaggcaaacgctttatcagttgatggacggtctgaatacgttttaccaacaatctttacaacaacctgttgccacgtctgcgcgccagtatctggaaaaacgcggattaagccacgaggttatcgctcgctttgcgattggttttgcgccccccggctgggacaacgtcctgaagcggtttggcggcaatccagaaaatcgccagagtttgattgatgcggggatgttggtcactaacgatcagggacgcagttacgatcgtttccgcgagcgggtgatgttccccattcgcgataaacgcggtcgggtgattggttttggcgggcgcgtgctgggcaacgatacccccaaatacctgaacagcccggaaacagacattttccataaaggccgccagctttacggtctttatgaagcgcagcaggataacgctgaacccaatcgtctgcttgtggtcgaaggctatatggacgtggtggcgctggcgcaatacggcattaattacgccgttgcgagcttaggtacgagtaccaccgccgatcacatacaactgttgttccgcgcgaccaacaatgtcatttgctgttatgacggcgaccgtgcaggccgcgatgccgcctggcgagcgctggaaacggcgctgccttacatgacagacggccgtcagctacgctttatgtttttgcctgatggcgaagaccctgacacgctagtacgaaaagaaggtaaagaagcgtttgaagcgcggatggagcaggcgatgccactctccgcatttctgtttaacagtctgatgccgcaagttgatctgagtacccctgacgggcgcgcacgtttgagtacgctggcactaccattgataagccaagtgccgggcgaaacgctgcgaatatatcttcgtcaggaattaggcaacaaattaggcatacttgatgacagccagcttgaacgattaatgccaaaagcggcagagagcggcgtttctcgccctgttccgcagctaaaacgcacgaccatgcgtatacttatagggttgctggtgcaaaatccagaattagcgacgttggtcccgccgcttgagaatctggatgaaaataagctccctggacttggcttattcagagaactggtcaacacttgtctctcccagccaggtctgaccaccgggcaacttttagagcactatcgtggtacaaataatgctgccacccttgaaaaactgagcatgtgggacgatatagcagataagaatattgctgagcaaaccttcaccgacagtctcaaccatatgtttgatagcctgcttgaactgcgccaggaagagttaatcgctcgtgagcgcacgcatggtttaagcaacgaagaacgcctggagctctggacattaaaccaggagctggcgaaaaagtgatttaacggcttaagtgccgaagagcgatcgggaagcccccgacagccgcactgagaggcagcggcaaatatataagtacgccctcgtaattatcgttggcggtaaacaaccgttggatttcagcgttaacggctgaaggacatcgggtcaatcgcccaacaccaacctcatgaaataagtgtggataccgtcttatggagcaaaacccgcagagtcagctgaaacttcttgtcacccgtggtaaggagcaaggctatctgacctatgccgaggtcaatgaccatctgccggaagatatcgtcgatagtgatcagatcgaagacatcatccaaatgatcaacgacatgggcattcaggtgatggaagaagcaccggatgccgatgatctgatgctggctgaaaacaccgcggacgaagatgctgccgaagccgccgcgcaggtgctttccagcgtggaatctgaaatcgggcgcacgactgacccggtacgcatgtacatgcgtgaaatgggcaccgttgaactgttgacccgcgaaggcgaaattgacatcgctaagcgtattgaagacgggatcaaccaggttcaatgctccgttgctgaatatccggaagcgatcacctatctgctggaacagtacgatcgtgttgaagcagaagaagcgcgtctgtccgatctgatcaccggctttgttgacccgaacgcagaagaagatctggcacctaccgccactcacgtcggttctgagctttcccaggaagatctggacgatgacgaagatgaagacgaagaagatggcgatgacgacagcgccgatgatgacaacagcatcgacccggaactggctcgcgaaaaatttgcggaactacgcgctcagtacgttgtaacgcgtgacaccatcaaagcgaaaggtcgcagtcacgctaccgctcaggaagagatcctgaaactgtctgaagtattcaaacagttccgcctggtgccgaagcagtttgactacctggtcaacagcatgcgcgtcatgatggaccgcgttcgtacgcaagaacgtctgatcatgaagctctgcgttgagcagtgcaaaatgccgaagaaaaacttcattaccctgtttaccggcaacgaaaccagcgatacctggttcaacgcggcaattgcgatgaacaagccgtggagcgaaaaactgcacgatgtctctgaagaagtgcatcgcgccctgcaaaaactgcagcagattgaagaagaaaccggcctgaccatcgagcaggttaaagatatcaaccgtcgtatgtccatcggtgaagcgaaagcccgccgtgcgaagaaagagatggttgaagcgaacttacgtctggttatttctatcgctaagaaatacaccaaccgtggcttgcagttccttgacctgattcaggaaggcaacatcggtctgatgaaagcggttgataaattcgaataccgccgtggttacaagttctccacctacgcaacctggtggatccgtcaggcgatcacccgctctatcgcggatcaggcgcgcaccatccgtattccggtgcatatgattgagaccatcaacaagctcaaccgtatttctcgccagatgctgcaagagatgggccgtgaaccgacgccggaagaactggctgaacgtatgctgatgccggaagacaagatccgcaaagtgctgaagatcgccaaagagccaatctccatggaaacgccgatcggtgatgatgaagatagccatctgggggatttcatcgaggataccaccctcgagctgccgctggattctgcgaccaccgaaagcctgcgtgcggcaacgcacgacgtgctggctggcctgaccgcgcgtgaagcaaaagttctgcgtatgcgtttcggtatcgatatgaacaccgactacacgctggaagaagtgggtaaacagttcgacgttacccgcgaacgtatccgtcagatcgaagcgaaggcgctgcgcaaactgcgtcacccgagccgttctgaagtgctgcgtagcttcctggacgattaatcggtaggccggatcaggcgttacgccgcacccggcactaggccctctgcacaaacgccaccttttcggtggcgttttttatcgcccacgcactaccagcgcctggtccagctcgcgatacgcttcaaccagtttctccagactaacgcgacttaaaccgctgggatttggcagcacccaaatctgcgtgctaccaatggtgagcgtttgtttcccccactgtgcaccgcgctggctgaatccctgttcatatgcttgtttgcccagaatcgccaacgcctgcggctgataatcttcaattttttcaatcagcttacgcccgcctgcgtgtagctcctgcttactaacttcattggcttgcaccgttggacggtctaccagtttggtgacgccacaacgataatccagcagatgctgtgcctcctgcggcttcaactgacggtcggtaaacccggcctgatatatcaccttccagaagcgatttgccggatgagcaaagggaaaaccagtcccggcggaactaagcccagggttgataccgcaaaacacgacccgtaaccctggagccaaaatatcctcaaccatatttactcctttctaacatcaccaggaaaagtataacggattgaaaatacattgtttataaaaacagcaggcgcgcggtaatggctggattgcgacacggagttactttataatccgctaccatggccccttagctcagtggttagagcaggcgactcataatcgcttggtcgctggttcaagtccagcaggggccaccagatatagcaaaggctgacgagaaatcgtcagcctttttctttttatatatcagttactttgcgtgccagtaagccgctgcacgtacccgctgtgggtcatactgttccgcttcaaagcggcggcttaaattcttaacgactttaccttcgccggttatccagatgaagtaatcatcggcagggatttgcatctgcgccagacgcgcatctaccgcctgctcatcatgtgccagccattcgatattaaaaccatcaaggtgcgcgagataatcctgacaggcgttatcccgcacgctaaccagcgcactaacttgcggtttaacggcaagtttgctcaacgtttccaggcggcggcgcaatgcaggcattccggattcatcgcagacatacagctgatacgcgtaatcttccggcaccaccaggctaccgcgcggacctgccaccgtaagtttatcgcccggttgcgcctgcatcgcccagccgctggcgaccccaccgtcgtgaataaagaaatcaatcgccagttcatggcgtagttcgtcatacagcggcgtatagtcacggctcggtgggcgtggtccttccggccagacgatgccctcttccgttaccgttggcggcacaaagtgagcgtcaggttgaggaaagaagagtttgctgtgatcgtcaaagccacggcttgtaaaaccgtccagcgcctcgccgccgaggacaatgcgctgaaaaccggcgctgatgcgctcaacgcgtaacacagtcagttcacggaagcgcagatcattgcgaacgcgctgcgggtagcggggggtgttattcattgttatcgccttcgtgatggtaatcagatatatctaaataaaactcgcaaatgataatgattgttaatcatgataaatgcaagcgatttgtagaactgatatgtctatagtctgataagacgaaccgcctcttctcaggcatcattactcaacgccggatgcggcgtgaacgccttatccggcctacgtgtgagatgagtccacgtttaaaaatcatttttacacttgcaagaacgctcatatcagatataaattagatatatctaattaagcaaaaggaggctgatatgagccatcatcacgaagggtgttgtaaacatgaaggccagccacgccatgagggctgctgcaaaggtgagaagagtgaacacgagcactgcggacacggtcaccagcatgaacacggtcaatgctgcggtggtcgccacggtcgcggcggcggtcgtcggcaacgtttctttggtcacggtgaattacgtctggtgattctggatattctcagccgcgatgacagccacggttacgaattgattaaagcgattgagaatctaacccaggggaattacaccccaagcccgggcgtcatctacccaacgctggattttctgcaggagcagagcctgattaccatccgcgaagaggaaggaggtaagaagcagattgcgctgaccgaacaaggcgcgcagtggctggaagaaaaccgcgaacaggtggagatgattgaagaacgcatcaaagcgcgttgcgttggcgcggcgctgcgccagaacccgcaaatgaagcgggcgctggataattttaaagcggtgctggatttacgcgtcaaccagagcgatatcagtgatgcacaaataaaaaagatcattgcggtgatcgaccgcgccgcttttgatattacgcaactggattaatcgccgcatccgccagtggcgcggtgcaattgccggatgcgacgcttgacgcgccttatccggcctacacccgctacacaccccgcaggcctgataagatgcgccagcatcgcatcaggcattgtgctccaaccgccggatccggcataccgattaatgcagtaccgtcaccgcgtcttccagtcggctggcgcggtgtttcaccatcgcgctcacctgcgcactctcttccaccagctcggcatttttctgggtgatcaggttaagctcatccactgcacgggtcaggctggaaagcccatcggcctgttccagcgtactatggctaatctgggcgatcaactgggtgacgtttttcacctgtgccacaatatcttccatcgtccgtccggcggcgtgtacctgctggctaccggattgcaccttatcagcactggcatcaatcagcttgcgaatatcgttggcagcattagcgctgcggctggctaaatgacgcacttcccctgccaccactgcaaaacctttgccctgttcgccggcacgcgccgcttccaccgccgcattcagggccagaatattggtctgaaacgcaatatcgttaatcaggctagtaatggtgccaatgcgctgggtactgtcggcgatatcgtccattgtcttgatcaccgtggtcatcgcctccccaccctgcactgccgcattactggcagtgatactcagtttatcggcagcgctcgccgtggcagagttctgtttcacgctcgccgccatttggttcatggtcgccaccgtttgctgaacgttatcaactgtctgctgggtatgttcgttcagttcatcggtgcctttcgccagcgtctcactgccatttctgacactggacacctggctactgacatcgttaattagccaacggcacatcaggccaagttgccctaccgcacgtaatgtcagccccagctcatcgctgcgattcagatgctcaacactattacgttctccggtcgccaccttcagtgcctgatgggcaacattttctatcgggcgcacaatctgccattcaaaacaggcgcttgccaacaataccactaacgcacagaggatatacgtcaccaccggggcagcaacaaaccaaagcatggccgccagcaagataaacatcagggtcatcactccacgcgcccgccagcgaagcggtaaactaggcagtttacccagccagcctttacgcaccaccaggcctttatgaatacgcttactggtacgtccggcgttcaacgctttgtacagcggctccaccgccgcgatctcttcatccgtcgcccgggtacgaatgctcatatagccactgatttttccctcgcgcaccatcggtaccgcattggcccgcacccaataatggtcaccatttttgcggcgatttttcacgatgccgctccagggctccccttttttcagggtgaaccacatatccgcaaacgccgcttttggcatatccgggtgacgcaccatgttgtgcggctgcccttgtaactcttgcaaggtatagccgctcacctgcacaaaagtgtcattagcatgagtgatatagctttgcagatcggtagtggacatcagagtggtatcgtccgccagcggggtattttgctgggtgacatacggatgagaagacatgttcgcgtcctgtgcaggttatatggttgttaacttcttgtcagagtttatgtcggccccgctgcggttatctttaaccgattaatttgatttagatcgcaatttgcgatttaaacacaaatctaattccttgatttaaaatactttcactctgttactatacgaaaacgttaattatcttgcccaaaaatcaggcaattattgccctgaaaacgtgcatttgcgcagcaatcatcaaatccatacccgacaaaaaccgtgcaaaataacaacaaatgttaacagatagcattaaatattgcacaaatgataaccgaatttgtgtttatcccgattttcgcgatcgcagccggagtggcgcaatccctgcaatacttaaatcggtatcatgtgatacgcgagcctccggagcatattttgaacaggttacctagcagcgcaagcgctttagcgtgcagcgcccacgccctgaatctcattgagaagcgaacgctggatcatgaggagatgaaagcacttaaccgagaggtgattgaatacttcaaagagcatgtcaatccggggtttttagagtatcgcaaatctgttaccgccggcggggattacggagccgtagagtggcaagcgggaagtttaaatacgcttgtcgacacccagggccaggagtttatcgactgcctgggaggttttggaattttcaacgtggggcaccgtaatccagttgtggtttccgccgtacagaatcaacttgcgaaacaaccgctgcacagccaggagctgctcgatccgttacgggcgatgttggcgaaaacccttgctgcgctaacgcccggtaaactgaaatacagcttcttctgtaatagcggcaccgagtccgttgaagcagcgctgaagctggcgaaagcttaccagagtccgcgcggcaagtttacttttattgccaccagcggcgcgttccacggtaaaagtcttggcgcgctgagcgccacggcgaaaagcaccttccgcaaaccgtttatgccgttactgccgggcttccgtcatgtgccgtttggcaatatcgaagccatgcgcacggctcttaacgagtgcaaaaaaaccggtgatgatgtggctgcggtgatcctcgaaccgattcagggtgaaggtggcgtaattctgccgccgccgggctatctcaccgccgtacgtaagctatgcgatgagttcggcgcactgatgatcctcgatgaagtacaaacgggcatggggcgcacgggcaagatgttcgcctgcgagcatgagaacgtacagccggatatcctctgccttgccaaagcgctcggcggcggcgtgatgccgattggcgcgaccatcgccactgaagaggtgtttagtgttctgttcgacaacccattcctgcataccaccacctttggcggcaacccgctggcctgtgcggcggcgctggcgaccatcaatgtgttgctggagcagaacttaccggctcaggctgagcaaaaaggcgatatgttgctggacggtttccgtcaactggcgcgggaatatcccgatctggtacaggaagcgcgtggtaaagggatgttgatggcgattgagtttgttgataacgaaatcggctataactttgccagcgagatgttccgccagcgcgtactggtggccggaacgctcaataacgccaaaacgatccgcattgaaccgccactgacactgaccattgaacagtgtgaactggtgatcaaagcggcgcgtaaggcgctggcggccatgcgagtaagtgtcgaagaagcgtaatatcaaatcggatggcgatacgacgtcgccatccgatctttttatacgacgcgtacgcccgcaggcatcatccgctccggcgttaacagcacgctttcactgccgtcatcggtttccgcacacaacagcatgcattcgctcgtttcaccacgcattttcgctttttgcagattgcataagaccaccaccgttttccccatcagctcttcttcgctgtagtacggcaccaggctggtcacggtttgcagcgttttttgccccacatcaacctgtacgatgtacagcttgtcggcgttttcatggcgtttcacttccacaatctttccgacgcgcatttccagacgtgcaaaatcagcgtaagccacggtttccattgcttcctcccttagggtaaaattttactaaactatagcaaaagtttttctcaatcctgtaggctaaaaatggagaatgcaggcgtgatcacattcgtgagccgctgtgttaccgttacagcgtcaaagaaacgcgctttatttactgaaaacaggtgacccgataagcacttcctctacaatgggggcgcacatcagggaaagtaaaaaaggtaaacatggcaacactaaaagacatcgcaatcgaagctggcgtatccctggcgacagtatccagggtcttaaatgacgatccgacattgaatgtgaaagaagagacgaaacatcgcattctcgagatcgccgaaaagctggagtacaagaccagtagtgcccgtaaactccagacaggtgcagtcaaccaacaccatattctggctatctacagctaccagcaggagctggagatcaacgatccttactatctggcgatccgccacggcattgaaacccagtgcgaaaagctgggcatcgagctcaccaactgttatgaacacagcggcttaccagacattaaaaacgtcaccggtattttaattgtcggcaaacccacgcccgccctgcgcgccgctgccagcgcgttgaccgacaatatctgttttatcgactttcacgaacccggcagcggttacgatgcggtggatatcgatctggcacgcatcagtaaagaaatcatcgacttctatatcaaccagggcgttaatcgtattggttttattggcggtgaagatgagcctggcaaggcggatattcgtgaggtcgcctttgcggaatatggccgactgaaacaagtggtacgcgaagaggatatctggcgcggcggtttttccagtagcagcggttatgaactggcaaaacaaatgctggcgcgggaagactatccgaaggcactgtttgttgcttccgattccattgctatcggcgtactgcgggcaattcatgaacgaggcctgaacatcccacaggatattagccttatcagcgttaacgatatccccaccgcgcgatttacctttccgccgctctccaccgtgcgcatccattccgagatgatgggaagtcagggcgttaacctggtgtatgaaaaagcccgcgatggtcgcgcgctgccgctgttagtcttcgttcccagcaaattaaaactgcgcggcacgacccgttaaatccccttacacactgtccggcaatcgtttttgccggacagtgctgccgtttattttcgtgatccagttaaagtaaatgcatttacctgctactttttagtaaaaattttactaaactccccagcaattacacaaactaccatcaccatgaatggttccgatttctctctaccgggaggccctatgaatcgctgggaaaacattcagctcacccacgaaaaccgacttgcgccgcgtgcgtacttttttagttatgattctgttgcgcaagcgcgtacctttgcccgcgaaaccagcagcctgtttctgcccttaagcggtcagtggaatttccacttttttgaccatccgctgcaagtaccagaagccttcacctctgagttaatggctgactgggggcatattaccgtccccgccatgtggcaaatggaaggtcacggcaaactgcaatataccgacgaaggttttccgttccccatcgatgtgccgtttgtccccagcgataacccaaccggtgcctatcaacgtattttcaccctcagcgacggctggcagggtaaacagacgctgattaaatttgacggcgtcgaaacctattttgaagtctatgttaacggtcagtatgtgggtttcagcaagggcagtcgcctgaccgcagagtttgacatcagcgcgatggttaaaaccggcgacaacctgttgtgtgtgcgcgtgatgcagtgggcggactctacctacgtggaagaccaggatatgtggtggagtgcggggatcttccgcgatgtttatctggtcggaaaacacctaacgcatattaacgatttcactgtgcgtaccgactttgacgaagcctattgcgatgccacgctttcctgcgaagtggtgctggaaaatctcgccgcctcccctgtcgtcacgacgctggaatataccctgtttgatggcgaacgcgtggtgcacagcagcgccattgatcatttggcaattgaaaaactgaccagcgccagctttgcttttactgtcgaacagccgcagcaatggagtgcagaatccccttatctttaccatctggtcatgacgctgaaagacgccaacggcaacgttctggaagtggtgccacaacgcgttggcttccgtgatatcaaagtgcgcgacggtctgttctggatcaataaccgttatgtgatgctgcacggcgtcaaccgtcacgacaacgatcatcgcaaaggccgcgccgttggaatggatcgcgtcgagaaagatctccagttgatgaagcagcacaatatcaactccgtgcgtaccgctcactacccgaacgatccgcgtttttacgaactgtgtgatatctacggcctgtttgtgatggcggaaaccgacgtcgaaagccacggctttgctaatgtcggcgatattagccgtattaccgacgatccgcagtgggaaaaagtctacgtcgagcgcattgttcgccatatccacgcgcagaaaaaccatccgagcatcatcatctggagcctgggcaatgaatccggctatggctgtaacatccgcgcgatgtaccatgcggcgaaagcgctggatgacacgcgactggtgcattacgaagaagatcgcgatgctgaagtggtcgatattatttccaccatgtacacccgcgtgccgctgatgaatgagtttggtgaatacccgcatccgaagccgcgcatcatctgtgaatatgctcatgcgatggggaacggaccgggcgggctgacggagtaccagaacgtcttctataagcacgattgcattcagggtcattatgtctgggagtggtgcgaccacgggatccaggcacaggacgaccacggcaatgtctggtataaattcggcggcgactacggcgactatcccaacaactataacttctgtcttgatggtttgatctattccgatcagacgccgggaccgggcctgaaagagtacaaacaggttatcgcgccggtaaaaatccacgcgcgggatctgactcgcggcgagttgaaagtcgaaaataaactgtggtttaccacgcttgatgactacaccctgcacgcagaggtgcgcgccgaaggtgaaacgctcgcgacgcagcagattaaactgcgcgacgttgcgccgaacagcgaagcccccttgcagatcacgctgccgcagctggacgcccgcgaagcgttcctcaacattacggtgaccaaagattcccgcacccgctacagcgaagccggacaccctatcgccacttatcagttcccgctgaaggaaaacaccgcgcagccagtgcctttcgcaccaaataatgcgcgtccgctgacgctggaagacgatcgtttgagctgcaccgttcgcggctacaacttcgcgatcaccttcagtaaaatgagtggcaaaccgacatcctggcaggtgaatggcgaaagcctgctgactcgcgagccaaagatcaacttcttcaagccgatgatcgacaaccacaagcaggagtacgaagggctgtggcaaccgaatcatttgcagatcatgcaggaacatctgcgcgactttgccgtagaacagagcgatggtgaagtgctgatcatcagccgcacagttattgccccgccggtgtttgacttcgggatgcgctgcacctacatctggcgcatcgctgccgatggccaggttaacgtggcgctttccggcgagcgttacggcgactatccgcacatcattccgtgcatcggtttcaccatgggaattaacggcgaatacgatcaggtggcgtattacggtcgtggaccgggcgaaaactacgccgacagccagcaggctaacatcatcgatatctggcgcagcaccgtcgatgccatgttcgagaactatcccttcccgcagaacaacggtaaccgtcagcatgtccgctggacggcactgactaaccgccacggtaacggtctgctggtggttccgcagcgcccaattaacttcagcgcctggcactatacccaggaaaacatccacgctgcccagcactgtaacgagctgcagcgcagtgatgacatcaccctgaacctcgatcaccagctgcttggcctcggctccaactcctggggcagcgaggtgctggactcctggcgcgtctggttccgtgacttcagctacggctttacgttgctgccggtttctggcggagaagctaccgcgcaaagcctggcgagctatgagttcggcgcagggttcttttccacgaatttgcacagcgagaataagcaatgaggatcatcgataacttagaacagttccgccagatttacgcctctggcaagaagtggcaacgctgcgttgaagcgattgaaaatatcgacaacattcagcctggcgtcgcccactccatcggtgacagtttgacttaccgcgtggagacagactccgcgaccgatgcgctatttaccgggcatcgacgctattttgaagtgcattactacctgcaagggcagcaaaaaattgaatatgcgccgaaagagacattacaggtagtggaatattatcgtgatgaaactgaccgtgaatatttaaaaggctgcggagaaaccgttgaggtccacgaagggcaaatcgttatttgcgatatccatgaagcgtatcggtttatctgcaataacgcggtcaaaaaagtggttctcaaagtcaccatcgaagatggttatttccataacaaataacaactacggcggcaaaaggagtttgccgccaccgctaccctactcattttcggagatgtgttatgtctgataccaaacgtaatacaatcggcaaattcggcttgctcagcctgacttttgccgccgtttacagctttaacaacgttatcaataataatattgagcttggactggccagcgcaccgatgtttttcctcgcgacgattttttattttattcccttctgtctgatcatcgcagaatttgttagcttaaataaaaacagtgaagccggtgtctacgcgtgggtaaaaagtagcctgggcggacgttgggcatttattactgcctatacctactggttcgtaaacctgttctttttcaccagtctgttgccgcgcgttattgcttatgctagctatgccttcctcggatacgaatatattatgacgccggttgccaccaccattatcagtatggtgctgttcgccttctccacctgggtttccaccaacggggcgaaaatgttggggccaattacctccgtcactagtacgctgatgctgctgttaacgctctcctacattttactggcaggtacggcgctggttggcggcgtacagcctgctgacgccatcaccgttgacgcgatgatcccgaacttcaactgggcgttcctcggcgttaccacctggatctttatggccgcaggtggcgcggagtccgtcgctgtgtacgttaacgacgtcaaaggcggtagcaaaagcttcgttaaagtgatcatcctcgccgggatttttatcggcgtactgtattccgtctccagcgtgctgattaacgtcttcgtcagcagcaaagagttgaaatttaccggcggaagcgtgcaggtattccacggcatggcggcgtattttggtctaccggaagcgttgatgaatcgctttgtcggtctggtgtcctttaccgcgatgttcggttccctgctgatgtggaccgcaacgccggtgaaaattttcttctccgaaatcccggaaggcatctttggtaagaaaaccgtcgaactgaacgaaaacggcgttccggcgcgcgcagcgtggatccagttcctgatcgtcatcccgctgatgattatcccgatgctcggttccaataccgtgcaggatctgatgaatactattattaatatgaccgccgcagcgtccatgcttccgccgttattcatcatgctggcttacctgaatttacgcgccaaattagatcacctgccacgcgatttccgtatgggctcccgccgcaccggtattatcgttgttagtatgctgattgcgatatttgccgtagggtttgtcgctagcacattcccgactggcgcgaatattctgaccatcattttttataacgtcggcggtattgttatcttccttggctttgcgtggtggaaatacagtaaatatataaagggattaacggctgaagagcgccatattgaagcgacgccagccagcaatgttgattaagcagaataataaaaaatgagcaggcattttccctcttcctggatgaggagagggaaaatagtttctgcctttatatttttataattacaacgataaaaggctgtactttttctttagctcatggattaacacaatgaaattaatcactgcaccatgcagagcattacttgctctgccgttttgctacgccttttctgcggcaggagaagaagcacgtccggcagaacatgacgacacaaaaacacccgcaattaccagcacatcttctcctagttttcgtttttacggcgaattaggggttggtggatatatggatttagagggtgagaataaacataaatacagcgacggtacctatattgaaggtggcctggagatgaagtacggctcctggttcggcctgatttacggcgaaggctggaccgtgcaggccgaccacgacggcaatgcctgggtgccagaccatagctggggtggtttcgagggcggaattaaccgtttctatggcggttatcgtaccaatgatggcaccgaaatcatgctcagtctgcgtcaggattccagcctggatgacctgcaatggtggggcgatttcacccccgatctgggctacgtcattcccaatacccgcgacattatgactgcgctgaaggtacagaacttaagcggcaactttcgttatagcgtcaccgcgactcctgccggacatcatgatgaaagcaaagcctggctacattttggcaaatacgatcgctatgacgacaaatacacctatccggcaatgatgaacggttacatccagtatgaccttgccgaaggcatcacctggatgaacggtctggaaatcaccgacggcacaggacagctctatctcacgggcctgctaactcctaactttgccgctcgcgcctggcaccataccggacgcgccgacgggctggacgtaccgggaagtgaaagtgggatgatggtgagcgccatgtatgaagcgttaaagggcgtttatctctccaccgcttacacctacgccaaacatcgccctgaccacgctgacgatgaaaccacctctttcatgcagtttggtatctggtacgaatacggcggcggacgtttcgccacggcttttgatagccgcttctacatgaaaaatgcctctcacgatcccagcgaccaaatcttcctgatgcaatatttctactggtaataaggactgtaatttcatgaaaataaaaactattttaacgccagtaacctgcgctctgctgataagtttttccgcccatgccgctaacgccgacaattataaaaacgtgattaaccgtactggcgcgccgcagtacatgaaggattacgattacgacgatcaccagcgttttaatccgtttttcgatctcggagcctggcatggtcatctgttgccagacggccctaacaccatgggcggctttccgggcgttgcgctgctgacggaagagtacatcaactttatggccagcaatttcgaccgcctgaccgtctggcaggacggcaagaaagtcgactttacgctggaggcatacagtattcccggtgcgctggtgcaaaaactgacagcaaaagatgtgcaagtcgaaatgactctgcgcttcgccacgccgcgcacgagtctactggaaaccaaaatcaccagcaataaaccgctggatctggtgtgggacggcgaactgctggaaaaactggaagcgaaagaagggaaaccgctttccgataaaaccattgctggcgaatgccctgactatcagcgcaaaatcagcgccacccgtgatggcctgaaagtcacctttggcaaagtgcgcgccacctgggatctgctgacctccggcgaaagcgaatatcaggtgcataaatccctgccggtgcagactgaaatcaacggtaatcgctttaccagtaaggcgcatatcaacggtagcaccacgctctacaccacctattcccatctgctgaccgctcaggaagttagcaaagagcaaatgcagatccgcgatattctggcgcgtccggcgttttatctcaccgccagccagcaacgctgggaagaatacctgaagaaagggttaaccaatccggatgcgacgccggaacagacgcgcgtcgcggtgaaagcgatcgaaacgctcaacggtaactggcgcagtccgggcggtgcggtgaaatttaacaccgttacaccgagcgtgaccgggcgctggttctccggcaatcagacctggccgtgggatacctggaagcaggcgtttgcgatggcgcatttcaatccggacatcgccaaagagaatatccgcgcggtcttctcctggcagatccagcctggcgatagcgtgcgtccgcaggatgtgggctttgtccccgacctgatagcgtggaaccttagccccgagcgtggtggcgatggcggcaactggaacgaacgtaataccaaacccagccttgccgcctggagcgtgatggaagtgtataacgtcacccaagataaaacctgggtggcagagatgtacccgaaactggtggcctatcacgactggtggttacgtaaccgcgatcacaacggcaacggcgtgccggaatatggcgcgacccgcgacaaagcccacaacactgagagcggcgagatgctgtttacggtgaaaaaaggcgataaagaagagacgcagtctgggctgaacaactacgcccgcgtggtggagaaaggccagtacgacagtctggaaattccggcacaggttgctgcaagctgggaaagcgggcgtgatgatgccgccgtctttgggtttatcgacaaagaacagttggataaatatgtcgctaatggcggcaaacgtagcgactggacggtgaaattcgccgaaaaccgcagtcaggacggaacgttgctgggctacagcctattgcaggagagcgtggatcaggccagctatatgtacagcgataaccattatctggcggagatggcaaccatcctcggtaagccagaagaggccaaacgctatcgccagttggcacagcagctcgcggactacatcaacacctgtatgttcgacccgactacccagttctactatgacgtacgtattgaagataaaccactggcgaacggctgcgcgggcaaaccgattgttgagcgcggtaaagggccggaaggctggagcccgctgtttaacggtgcggcaacgcaggccaatgccgacgcggtggtgaaggtgatgctcgatcctaaagagttcaacacctttgtcccgctgggaacggcggcgttaaccaatccggcttttggcgctgatatctactggcgtgggcgcgtatgggtggatcagttctggtttggtctgaaagggatggagcgttacggttatcgtgatgatgccctgaagctggcggatacgttcttccggcacgccaaagggttaaccgccgatggaccaattcaggaaaattacaacccgctgacaggcgcacagcaaggcgcaccaaatttctcctggagtgccgcgcatttgtatatgttgtataacgattttttccgtaagcaataatttgcaactgctggcggatgcggcgtaaacgccttatccgccctacatgtgcaatcctcctggccggataaaacgcggcaagcgttgcatccggcaactgcaccgcgccactggcggatgcggcgtgaacgccttatccgccctacatgtgtgttcccgtaggtcggataagacgcgacaagcgtcgcatccggcatctgcaccgcgccactggcggatgcggcgtggacgccttatccgccctacatgtgcaattccgtaacctggataaaacgcgacaagcgtcgcatccggcgttatcaccgggcgtattctttttgaatcccatcacaaaccccgcactccccttttcccttttctccggcgacggctaaattagaactcatccgaccacataacaattattttacatactggacaattttatgagctacccgagcctgttcgccccgctggatttaggttttaccacgttaaaaaaccgcgtgttgatgggcagtatgcacaccgggctggaggaatacccggacggtgccgagcggctggcagcgttttatgccgaacgcgcccgtcacggcgtggcgctgattgtcagcggcggcattgcaccagatttaacaggcgttggcatggaaggtggcgcaatgctcaacgacgccagccagatcccacaccatcgcaccattaccgaagcggtacatcaggaaggcggcaaaatagccctgcaaattttgcataccgggcgctacagctaccaaccgcatctggtcgccccgtccgcattgcaggcccccatcaaccgtttcgtgccccatgagttaagccatgaagagatcctgcaactgatcgacaatttcgcccgctgcgcgcaactggcgcgggaggcaggatacgacggtgtagaggtgatgggttccgaagggtatttgatcaacgaatttctgacgctgcgcaccaatcagcgtagtgaccagtggggcggcgattaccgcaaccggatgcgatttgccgtagaagtagtgcgtgcggtgcgcgaacgcgtcggcaacgacttcattattatctaccgactgagcatgctcgacctggtcgaagacggcgggacttttgccgaaacggtagagctggcgcaggccattgaagcggcgggcgcgaccattatcaacaccggcattggctggcatgaagcacgtattccgaccattgccacgcccgtgccgcgcggcgcatttagctgggtcacgcgcaaactgaaaggccacgtcagcctgccgctggtaaccaccaaccggattaacgatccgcaggttgccgacgatattctcagccgcggcgatgccgatatggtaagcatggcgcgaccgtttcttgctgatgcggagctgctgagtaaagcgcaaagcggacgagccgatgagatcaacacttgtattggctgcaatcaggcctgtctcgatcaaatcttcgttggcaaagtcaccagctgcctggtgaatcctcgcgcctgccacgaaaccaaaatgccaatccttcccgccgtgcagaaaaaaaatctggcggtggtcggtgcgggacctgctgggctggcgtttgccattaacgcggcggcgcgtgggcatcaggtaacattgtttgacgctcatagcgagattggcgggcagtttaatatcgccaaacagatccccggcaaagaggagttttacgaaacgctgcgctattaccgccggatgatcgaagtgacgggcgtgacgctaaaactcaatcacaccgtgacggcggatcagttacaggctttcgatgaaacgatcctcgccagtgggatcgtgccgcgcactccgcccatcgacgggatcgatcatccgaaggtattgagttatctcgatgtactgcgcgacaaagcgccggttggcaacaaagttgccatcatcggttgtggcgggattggttttgatacggcgatgtatttaagtcagccgggcgaatccaccagccagaatatcgccgggttctgtaatgaatgggggatcgacagtagcctacaacaggctggtggcttaagcccgcagggaatgcagatcccccgtagcccacggcagattgtgatgctccagcgcaaagccagcaaaccaggacaggggttaggcaaaaccaccggctggatccatcgcaccaccctgctcagccggggtgtgaaaatgatcccaggcgtaagttatcagaagattgacgatgacgggctgcatgtggtgatcaacggcgaaacgcaggtattagcagtggacaatgtggtgatctgcgcagggcaagagccaaaccgcgcgctggcgcaaccgctgattgatagcgggaaaacggtgcatttaattggcggctgcgatgtggctatggagctggacgcacgacgggcaattgcccagggaacacggctggcgctggagatttaaatcgttatttgaagcgccggatgcaacgcatccggcacgtcgcgttaatcaataaacaaggcgggagaaatgccgaatcgcgttgccaattttttagcgtgttccagcgttaatttcctcttcccgctcaaaacgcgactcaccatagatttactgccaatttccggcagatcggaaagggttaaaccatattgatccataagggtacgaatcacggctataccgccaggcatggcttgagccatggcattaaattccgcaaattcgggcgcactttcttcccacgcggttattttggcacacaccagatccagcaaggggttttcaggatcgttgagcagcagatgatctaccagttccagcgcctgggtgtattgttcctcgttctgaatacccgccagaaaaggtgccacagcagttagcttttctcctgcttgcaagatgtcggcaatcgcaatcattttttccccttagtacgatgaacagcggtaaagaaatcgtattctttatgcgtcataacttcacgtatgtagcacttttggctttcaaaaaagaccattgctacaacacgtaattcattgcccccaacattgaaaacataatgcttatccagatatttgaagttatccagagatgggaatactgcttttaaactctcaggttttttgaaatatcccttagcaatcgtgttccccagagccaccaactccgttttatgttgcgggtatttttccgcagcatctttcaatgctttttgagttatcaggtgcattcttcatcacgtccgttgacaaattggcaatatgataacatccgttgccagattggcaacggatgaatttatctgtgtgacggaagaataaacgtagaaaaacgctaaacaagagaatgtagacgatggtgacagggattttttgttttatggaagcgcgattccagaactgggcagacattgccggatgcgacgcttgccgcgtcttatccggcctggagtaacgtgctgaacgtaggccggataaggcgtttacgccgcatccggcaggtaactcccaatcttaccgacgacgtcccagcttcaccgctttcagtaccacaaatttattattcgtcgcaatagtggtgcagttgccgaaaatcttcttcagtttatggaagtaatccaggtgacggttggcaacgatatacagctcgccgttgattttcaggcagcggcgggcgtggtggaacatctcccaggcgacgttatcggtcagcgcatgttgttggtgaaacggcgggttgcagagcacagcattaaagcggaaaggctccacgccggagagcgcgttgttgatcataaactcgcagcgatccaacgcctctggcatgttggtttcaacgttcaaacggctggaagcaaccgccatcgggctttcatcgacaaacaccactttcgcctgcgggtttttatcaagcagcgtcagaccaataacgccattaccgcaaccgagatcgacaatctccccttcgagattctctggcagatgttgcataaagaagcgcgcgccgatatcaagcccggtgcgggagaagacattcgcatggttgtggatagtccagtcagtaccttccagcttccagctaacggtctgcggcgcatcggccagctgcggttcattgaaagtgcaattaatcaggcgcgcttttttccatgccagcgtggtggtggttgggccgagcactttttcgaacagttccagcgtggaagtgtgaatgtcacgggccttggcaccggcaataatacgtgtatcgctcgtgaccactttgcgcagcgcacgcagttgctgttccagcaatgccagtgttttcggcactttgatcagcaccacacccggctgttgcgggtagtcggcggtgctgtcgagaaacttcacgctgctctcatcaatcccgttgaggcgtaaattctcgcgcgtcgccagttcactgatgtaactgtcgccaatgctgtacggcttatgttccgccagtgcgcagcttaacgcaccaaaggcatcattcaggatcaacaccgggccgcggatttctgtgtcgtccaactgttgcagcaaatattcatccgccgcttcccacgcctgtagcgggttaacgtcatccgtcgccggaaaacgttgtagtgtcagactacggaaaccgttgtctaagtggctcatcggccctcctgaatgataaaatttcgacattgcccctgaaaagggtgcgtgagtataccctttttctctttttcgtgggcggttatgagcaatcttacttatcttcagggttatcccgagcagctactttcccaggtgcgaacactgattaacgaacagcgtctgggcgatgtgctggcaaaacgctatccgggaacacacgactacgccaccgataaagccctctggcaatatactcaggatctgaaaaatcagtttctgcgtaatgccccgccgatcaataaagtgatgtatgacaataagatccatgtgctaaaaaacgcgctcgggttacataccgctgtttctcgtgtgcagggcggcaagctgaaagcaaaggtggagatccgcgtcgctaccgtgtttcgcaacgcgccggaaccgtttttgcgcatgatcgtggtgcacgagctggcgcacctgaaggagaaagagcataacaaagcgttttaccagttgtgttgtcatatggaaccccagtaccaccagcttgagttcgacacccgactgtggctaacgcagttgagccttgggcagaacaaaatctgaaaatgatgtcaggcgttatcttttctttctttagcgcctaaaatcgacctcccccctttcgttaaggataacgaccatgctgcgcgcatttgcccgccttcttctccgtatttgtttttctcgccggactctaaagattgcctgcttactgttacttgtggcaggagcgaccatccttatcgccgatcgcgtaatggtcaacgccagcaaacagctgacctggagcgatgtcaacgccgttccggcgcgtaacgtgggtttattgctgggggcgaggccgggtaatcgctactttacccgacgtattgataccgcagcagcgttgtaccacgccggaaaagtgaaatggctgctggtaagtggcgataacggacgtaaaaattacgatgaagcaagtggtatgcagcaggctttgatcgctaaaggcgtaccagcaaaagtgatcttctgcgactatgccggattcagtacgctggatagcgtagtgcgtgccaaaaaggtttttggtgaaaaccatatcaccattatcagccaagaatttcataatcaacgcgccatctggctggcaaaacagtacggcatcgacgctatcggttttaacgcgccagacctcaatatgaagcacggtttttatactcaactgcgggagaaactcgctcgtgtcagcgccgtgattgacgccaaaatcctccatcgccagccgaaatatctcgggcctagcgtcatgattgggccgtttagtgagcatggctgtccggcgcagaaataatgcgtatctgcgcacgtcgaagatgaaaaaggcgtgctacattgacgacagaatccctttatggagtatccacgcgttatgatacgtttcgctgtgattggtacgaactggatcactcgccagttcgtcgaggccgcccatgagagcggtaaatacaagttaaccgccgtatattcccgcagccttgaacaggcccagcacttcgccaatgatttttctgtcgagcatctgtttaccagcctggaagcgatggcggaaagcgatgccattgacgcggtgtatattgccagcccgaattccctgcatttttcccagacacaacttttccttagccataaaattaatgtgatttgcgagaaaccgctggcgagcaatctggcggaagtggatgccgccattgcctgtgcgcgggaaaatcaggtggtgctgtttgaggcatttaaaaccgcctgcctgccgaactttcatttgttgcgccaggcgctgccgaaagtcggcaaactgcggaaagtctttttcaactattgccagtattccagccggtatcaacgttacctggatggtgagaatcccaacacctttaatccggcattctctaacggtagtattatggatatcggtttttactgtctggcgagcgcggtggcgttatttggtgagccgaaaagcgtgcaggcaaccgccagtttgctggcaagcggcgttgacgcccagggcgtggtggtgatggattacggtgatttcagcgtcaccttgcagcacagtaaagtcagtgattctgtcctggcgagcgagattcagggcgaagcaggaagcctggtgattgaaaaactgtctgaatgccagaaagtgtgcttcgtgccgcgtggcagccaaatgcaggatctcacccagccgcagcatattaataccatgctctacgaagcagagctgttcgctaccctggtggatgagcatctggtggatcatccagggctggcggtcagtcgcatcaccgccaaactgctgaccgagatccgccgccagactggggtgatttttccggcagatagcgtaaaactataattgccaaagtaaaacagtgtaaaaggtatgtaacagaccattgactggctgaatggtctgtcatactttgttacctgcaaaggggagtaacttcattgccggtcgatcgtcattacgatgtgtgaaaaaacacatccggtcaccgggcaacccgaaaggaatacgcagacgtattccttttttgttgtaagtgagaccttgccggaaggcgaggtctatgcataaaaagcagcggctgacgtcttccgacgttggccgtttttttatgtgtaaggaacttctatgaatactgtcggcacgccgttgctatggggcggattcgctgttgttgtcgccattatgctggctatcgacctgttgttgcaggggcgtcgtggggcacatgccatgaccatgaaacaggctgcggcctggagcctggtctgggtgacgctgagcttactgtttaacgccgctttctggtggtatctggtgcaaaccgaaggtcgcgccgttgccgatccacaggcactggcctttctcacaggttatctgattgagaaaagcctggcggtcgataacgtctttgtctggctgatgttgttcagctatttctctgttccggcggcattacaacgccgcgtgctggtgtatggcgtgctcggggcgattgttctgcgtaccatcatgatcttcactggcagctggctaattagccagttcgactggatcctgtatatcttcggtgccttcctgctgtttaccggcgtgaagatggcgctcgcccatgaagatgaaagtggcattggcgacaagccgctggtgcgctggctacgcggtcatttgcgcatgaccgacaccatcgacaacgagcatttctttgtgcgtaagaatggattgctgtacgccacaccgctgatgctggtactgattctggtggaattgagcgacgtgattttcgccgtggatagcattccggctatcttcgccgtgaccactgacccgttcattgtgctgaccagtaacctgtttgcgatcctcggcctgcgtgcgatgtatttcctgctggcgggcgtagcagagcgtttcagcatgctcaaatatggcctggcggtgattctggtgtttatcggtatcaagatgctgattgtcgacttctaccatattccaatcgccgtcagcctgggcgtggtgtttggcattctggtgatgacgtttattatcaacgcctgggtgaattatcggcatgataagcagcggggtggataatttttaatctgcctaagccgtgtaccctgtcattaacatgagcaccgttttctccctctcccttccagggagagggtcggggtgagggtaatttttcgcaccgatgctggcctgttcccctcaccctaaccctctccccaaacggggcgaggggactgaccgagtccttttttgatgttgtcatcagtctggaagccgcacgttggctttatttttatgtcaaagaaatgtaaccattaagtttcaaaatatgacctctctttaaaatccagcatttttcgcttcccgaagctgtaactttccttatactcgaccttgcaaacactttgttacatcctgaaagatgcgtcgacagaacgcaccagggatgtgcgacaacacaatgaaaggatcgaaaaatgactacgcaacgtagtccggggctattccggcgtctggctcatggcagcctggtaaaacaaatcctggtcggccttgttctggggattcttctggcatggatcagtaaacccgcggcggaagctgttggtctgttaggtactttgttcgtcggcgcactgaaagccgttgcccccatcctggtgttgatgctggtgatggcatctattgctaaccaccagcacgggcagaaaaccaatatccgccctattttgttcctctatctactgggcaccttctctgctgctctggccgcagtagtcttcagctttgccttcccttctaccctgcatttatccagtagcgcgggtgatattagcccgccgagtggcattgtcgaagtgatgcgcgggctggtaatgagcatggtttccaaccccatcgacgcgctgctgaaaggtaactacatcgggattctggtgtgggcgatcggcctcggcttcgcactgcgtcacggtaacgagaccaccaaaaacctggttaacgatatgagcaatgccgttacctttatggtgaaactggtcattcgcttcgcaccgattggtatttttgggctggtttcttctaccctggcaaccaccggtttctccacactgtggggctacgcgcaactgctggtcgtgctggttggctgtatgttactggtggcgctggtggttaacccattgctggtgtggtggaaaattcgtcgtaacccgttcccgctggtgctgctgtgcctgcgcgaaagcggtgtgtatgccttcttcacccgcagctctgcagcgaacattccggtgaatatggcgctgtgtgaaaagctgaatctggatcgcgatacctattccgtttctattccgctgggagccaccatcaatatggcgggcgcagcaatcactattaccgtgttgacgctggctgcggttaatacgctgggtattccggtcgatctgcccacggcgctgctgttgagcgtggtggcttctctgtgtgcctgtggcgcatccggcgtggcgggggggtctctgctgctgatcccactggcctgtaatatgttcggtattagcaacgatatcgccatgcaggtggttgccgtcggctttatcatcggcgtattgcaggactcttgcgaaaccgcgctgaactctagtactgacgtgctgttcactgcggcagcttgccaggcagaagacgatcgtctggcaaatagcgccctgcgtaattaattgtttaacccctttcgtctacggcggaaggggttttctcaactttaaacggatcaattccccttttctgcatccgccagaaacgaatgatattcaggccattcataagcagaaaactaccctcaatcatcgtgccgcctatgctccccgcccagaagttgtgaatcacccagcaacacgtactaaaccacattacgcagcgcatggtcagccctttacagcagaatagcgcccaggtactgacaatcgtgccgataaccggcaatagttcgacaggatgatggaacttcgcgaggccaattccgccagtcagcacaataaaaatcgccattacccataagctgcgcgtgcgtaaggtaatcaatgtacgaatggcattaaggatggcactggcaccagcgggataggtgcccagaagaaaaaaatgtacgccaataacggcgctatagacgctaagctgctttttgaagcgacgttcgtcacgattgaaaaatgttgtgataccaatcagaaaggcgatgacacccacgccctgggccagccaatacgcggtcatgataaatccttagcaggtatggaaaagcaaacggcgcttcacattatgaaacgccgttttttattaacaactcatttcgactttatagcgttacgccgcttttgaagatcgccagttcgcggaagtcgttacgctcgttacaggtttgcttaccgttggcaaactcaacgatggtgtcgataaattcttccagcaactgcggcatcgctttaccgtggatcaactgacccgcgtcaaagtcgatccagtgttttttcttcgccgccagttcactgttggtggcgattttcaccgtcggcacaaatccaccatacggcgtgccacgaccagtactgaacagcaccatatggcagcccgcacccgccagggcgctggtcgctacggcatcgttacccggcgcacttaacaagttcagccctggcgttttcagacgctcgccgtaacgcagcacgtcaaccacgacgctggaacccgctttctgggtacagccaagacttttgtcttccagcgtggtgataccgcccgctttgttccccgggcttgggttttcatagatcggctgatcatgggcaataaagtactgtttgaagtcgttgaccatggtgaccagtttttcaaacgttgcttcgtcgcggcaatggtccatcagcaactgctctgcgccaaacatctccggcacttcggtcagtacggtagtaccgccgttagcaatcacgtagtcagagaaacgccccagcatcgggttagcagtaataccagaaagaccgtcagaaccaccgcactccagaccaaacttcagttcgctgagtttgcctggctcgcgtttatcgttgcgcatcacgttatacagctgatgcaaatgctcgattccggcttcgatctcatcatcctgctgttggcagatcatgaaatgaacgcgttcaggatcgatatcgcccagcgtttcacggaatgcggcaacctggttgttttcacagcccagaccaatcaccagcactgcgcctgcgttcgggtggcgcaccatgttttgcagcatggtgcgggtattaatgtgatcgtcgcccagctgactgcagccgtaggtgtggctgaagaggaacacgccgtcagtaccttcggcgttgttggtctctttcagaaaacggttctggatctgccgcgcgatgccgttgacacagcccacggttggcaggatccacagctcattacgcaccccgacatcgccgttagcgcgacgatagatctgcacttcacgatctgccgcttgcgcaggcagatcctgaaaatcaggttgatagcgatactgatccagatcgctcagattcgtgcgcgtattgtgggcgtgaacgtgaacacctgccgcaatatccgccaatgcataaccaatcggcaggccatatttgatgacattggccccttttgcgatatccgttaacgcaaatttatgtccacgagcaacatcctggcgcagcgtaacagtctggttatcgacactgacttctgtgccttcagccaaatctgctaaagcgaccgcgacgttatccagcgcatggatcttgatgtattgcatatcaaccccagaccttagttcagttcaatggcgaagtagtcacgcgcattgttaaagcaaatatttttcaccatctcgcccagcaggttgatgtccgccggtgcttcgcccgcttccacccagcgaccgatcatctggcacagaatgcggcggaagtattcgtgacgggtgtaactcaggaagctacggctgtcagtcagcataccgacaaagcggctcagcagaccgagctgcgccagttgggtcatctgacgttccataccgtctttctgatcgttaaaccaccagccggaaccgaactgcattttgcccggcataccttcgccctggaagttaccgatcatggtgcccagcacttcgttatcgcgcgggttcaggcagtacagaatggttttcggcagcaggttttcttcattctgcttgctcagcaacttagacagctcttccgccatcggacggtcgttgatggagtcaaagcctacatccggccccagcagtttgaactgacgcaggttgttattacgcagcgcgccaatgtggtactgctgtacccagccgcgacgtgcatattcggcaccaaggaacaccagtaccgcagttttgaactgcgccacttcgtgctcgctcagggtttcgccagccagacggcgcgccagaatgctgtccagttccgcttcgttcgcttcagcaaacatcaccacatccagcgcgtggtcagacactttacagccgtgagcggcgaagtgatccagacgtttggtcagggcagtttgcaggtcagcaaagcggcgaatgtcggtatcggaaacttcgcccagcttcgccatgtagtcgttaaaggtcgcctgttcgatgttgaaggctttgtccggacgccagctcggcagcactttgatggtgaaagagccgtctttggcgatctctgcgtgatgctccagagaatcgatcgggtcatcggtggtgccgaccattttcacgttcatctgctgcatgatgccgcgcgcggagaagttatcctgcgccagcagttcgttacattcgttccagatttcatcggcagtactcggagaaagcaatttgccagtgataccaaacggacggcgcagttcgaggtgcgtccagtggtataacgggttgccgatagtgtgcggaacagtcgccgcccaggcgtcaaatttttcacggtcagacgcatcaccggtacacagacgctcggccacaccgttggtacgcatagcgcgccatttgtagtgatcgcctttcagccagatgtcatacaggtttttaaaacgatagtcttccgcaatctgctgcggcggcaaatggcaatggtaatcgaaaatcggctggtcttttgcgtagtcgtgatacagacggcgggcaaattcggtatctaacaggaaatcttcagtcataaacggagtcattttcgtcttcctctcaacgagtgagctagcttgcttatggtgcgatgctgacaaagttatcacaccaatttccagagtccgaagatattttcgtgagttagatcaataaacgtagttaaaaaaattactctcaaagtggtaaatctcgctgcaggccgcgccagtactggccttgctgtcgtcaggtaatgtccctacaaatattcccacatttgtgatggctctcaccttttaaagttgtatgacaagttatctttctgccgtcgcaaatcataagtcgacggaatgcaaattgccgattcattcatttgttagatgaatcgggttaaccggtacggaagccgaattagcacgaaactttcatggcaacgttcggggcgtgccggttttttttcggttacccggtcgtaactaacatcttcagcctctggcgggatgatggccgcgcttcctgcggatataacaaaacgatgaggttttacatgcgtaaaattaaagggttacgttggtatatgatcgcactggtgacgctcggcaccgtgcttggttacctgacgcgtaacactgtggcggcagctgcgccaactctgatggaagagttaaacatctccacccaacagtattcctatatcatcgcagcctattctgctgcttatacggtcatgcaaccggtagcaggttatgtactggatgtgctgggtacgaaaatcggttatgcaatgtttgctgtgctgtgggccgtgttctgtggtgcaaccgcgctggcaggtagctggggtggcctggctgttgctcgtggtgcggtcggtgccgcggaagcagcgatgatcccggcgggtctgaaagccagctccgaatggttcccggcgaaagagcgttccatcgcagtaggctactttaacgtaggttctagcattggtgcgatgattgcgccgccgctggtggtatgggcaatcgtaatgcacagctggcagatggcatttatcatctccggtgcattgagctttatctgggcgatggcatggctgattttctataaacatccgcgcgaccagaagcatctgaccgatgaagaacgcgactatattattaatggtcaggaagcccagcaccaggtgagcacggcgaagaaaatgtccgttggtcagatcctgcgtaaccgtcagttctggggtatcgcgctgccgcgtttcctggcagaaccggcctggggtacttttaacgcgtggatcccgctgttcatgtttaaagtttacggctttaacctgaaagagatcgcgatgttcgcctggatgccgatgctgtttgctgacctcggttgtatcctcggtggttacctgccgccgctgttccagcgttggtttggtgtgaacctgatcgtttcccgtaagatggtcgtaacgctgggtgcagtgctgatgattggcccgggtatgatcggcctgttcaccaacccgtatgtcgcaattatgctgctgtgtatcggtggttttgcccaccaggcactgtctggcgcgctgattacgctctcttccgatgtgtttggtcgtaacgaagtggcaacggcaaacggtttaaccgggatgtccgcatggctggcaagtacgctgtttgcgctggttgtcggtgcactggctgacaccatcggcttcagcccgctgttcgcagttctggcagtgttcgacctgttaggtgcgctggttatctggaccgtgttgcagaacaaaccggcgattgaggtggcgcaggaaacacataacgatcccgcaccgcaacattaacgtttcgtgtaagttttagtttcccttcaaagccgccttctcaggcggctttttcatcactgcgagtagagctaaactcgcaaaagtggtataacaaatatagtctgccgtatcatgcctggagcgcatatggaaatcactgaaccacgccgtttgtatcaacaacttgccgctgacctgaaagagcgcatcgaacagggcgtctatctggtgggtgataaactgcctgcagaacgctttattgccgatgaaaagaacgtcagccgtacggtagttcgtgaagccatcatcatgctggaagttgaaggctatgtcgaagtgcgtaaaggtagtggtattcatgtggtttccaaccagccgcgccatcagcaggcggctgacaataatatggaattcgccaattacggtccgtttgagttgcttcaggctcgccagctcatcgaaagtaatattgccgaattcgcggcaactcaggtaacgaaacaggacatcatgaaactgatggccattcaggaacaggcgcgcggcgaacaatgcttccgtgattccgagtgggatttgcagttccacattcaggtcgctctggcgacgcagaactccgccctggcggctatcgtggaaaaaatgtggacccagcgtagtcataacccgtactggaaaaaactgcacgaacacattgattcccgtaccgtcgataactggtgtgatgaccacgatcaaatcctcaaggcgctgattcgcaaagatcctcatgctgctaagctggcaatgtggcagcatctggaaaacaccaagatcatgttatttaacgaaaccagcgacgacttcgagttcaatgccgaccgctatctattcgccgaaaacccggtggtgcatctcgatacagccaccagcggcagtaaatgaaattcctgtccgacaggcgctgcaatgcgcctgtttgtctcgtcggtaagcgaaaagtataaagtgtcagcctgtgtaaatcctctcgccaccctcccctgcattcagcaaaatcagactccacggacatgtaattttgataacgaacaacgttgacctttgttacaattagattcaatttgaatttatgtttttgaatgctttcttatctcacgatttaacagggaatagttcaggctgtgttgatgtatcaaacccgcagaacataccaaaacagcaataacattgcggtagtgcatcttttaaaaccagcgtggcgttaaccgattcaccaggaataatgaatggaacttttgacccaattgctgcaagccctgtgggcgcaggattttgaaaccctggccaatccaagcatgattggcatgttgtattttgtcttgtttgtaattttgttccttgaaaacggcttgcttccggcggcctttttaccgggcgacagtttactggtattggtcggcgtgttgattgcgaaaggcgcgatgggctatccgcaaacgattctgctgctgaccgttgccgccagcctcggctgctgggtcagctatattcaggggcgatggctgggcaatacccgcaccgtacaaaactggctatctcatttacccgcgcattatcatcaacgcgcacaccatctttttcataaacacggtttaagcgcgctgttaattggtcgctttattgcgtttgtcagaacactgctgccgacgattgccgggttaagtgggctgaataacgcgcgctttcagtttttcaactggatgagcggtctgctgtgggtattgatcctgacaactctgggttacatgctcggcaaaacgccggtatttttaaagtacgaggaccagctgatgagttgcctgatgctgctcccggtggtgctgctggtgtttggcctggcaggttctctggtcgtgttatggaaaaagaaatatggaaatcgggggtaagggatgcaaatacctcgcatgagccttcgccagctagcctggtccggcgctgttttacttctggtcggcacgctgttgctggcctggtccgcggttcgccagcaagagtctacgctggcgattcgtgccgttcatcaaggcacaacgatgccagacggttttagtatctggcatcaccttgacgctcatggcattcctttcaaaagtatcacccccaaaaacgacactctgttaattacatttgactccagcgaccagagcgccgccgcaaaagcggtcctcgacagaacattgccccatggctacatcattgcgcagcaggacaataacagtcaggctatgcagtggctgacccggttacgggataactctcatcgcttcggataacttcctgttatccgaaacatatcactcactttggtgatttcaccgtaactgtctatgattaatgaggcggtggttaacactaccgcttcgttgtctggacaatcgttcctttgtaataggtccgaatcacaatggaaggttcaagaatgaaataccgcatcgctttagctgtttctctctttgctcttagtgccggtagttatgccactaccctgtgtcaggaaaaggagcaaaatatccttaaggagatcagctatgccgaaaaacaccaaaaccagaatcgtattgacggtctgaataaagccctgagtgaagtccgggccaactgtagtgatagccagctgcgtgccgatcatcagaagaaaatcgcaaagcagaaagatgaggtggcggaacgccagcaagatttagccgaggcgaagcaaaaaggcgatgccgataagattgccaaacgcgaacggaaactggcagaagcgcaggaagagctgaaaaagctggaagcgcgcgactactaactcacaatagtcactacttactcacctggagaaaactatgagcaaagaacacactacggaacatctgcgtgctgagttgaaatccctttccgatacgctggaagaggtgcttagcagttctggcgagaagagcaaagaagagttgagtaagattcgtagcaaagcggagcaggcactgaaacagagccgttatcgcctgggtgaaaccggtgatgccattgccaaacaaacccgtgtcgcggcggcgcgtgccgatgagtatgtgcgcgaaaatccgtggacgggcgtgggcattggcgctgcaatcggtgtagtgctcggcgttctgctgagccgtcgttaattatggcggacactcatcacgcacaagggcccggtaaaagcgttctgggcatcgggcagcgaattgtttctatcatggttgaaatggtagagacacgtctgcggctggcggtggtggagctggaagaggaaaaagcgaatctctttcaacttttactgatgctgggcctgacgatgcttttcgctgcatttggtcttatgagcctgatggtgctaattatttgggcggttgacccgcaatatcgcctgaatgcgatgattgccaccaccgtggtgttgctgctactggcactgattggcggtatctggacgctacgtaaaagccgtaagtctacgttgctgcgccatacacgccatgagttagcaaacgatcggcagctgctcgaggaggagtcccgtgagcagtaaagtcgaacgtgaacgacgtaaggcgcaactgcttagccagatccagcaacaacggctggatctttccgccagtcgtcgtgaatggctggagacaacaggcgcttacgatcgtcgctggaatatgctgctaagtctgcgctcctgggcgctggttggcagtagcgtgatggcgatctggacgattcgccatcctaatatgctggtccgctgggccagacgcggttttggcgtatggagcgcctggcgtctggttaaaacgaccctcaagcagcaacagcttcgcggttaacttccctctggccggagccattccggccttatccctcaaattttttgaagatttttgacagttttccttgctaacaatcatcattcaccacgtttatgattctctccatcgacagcaacgacgctaataccgcgccattgcacaaaaaaacaatcagcagcctgagtggcgcagtggagagtatgatgaaaaaattagaagatgttggtgtactggtagcgcgcattttaatgccgattctgtttattaccgctggctggggaaaaattactggctacgcgggtacccaacaatatatggaagcaatgggcgtcccgggttttatgctgccactggtgattctgcttgagtttggtggtggtctggcaatcctgttcggtttcctgactcgcaccacagccctgtttactgcgggctttacgctgctgacggcatttttatttcacagcaactttgctgaaggcgtcaacagcctgatgttcatgaaaaacctgacaatttctggcggattcctgctgctggcaattaccggtccgggcgcgtatagcatcgaccgcctgctgaataaaaagtggtaagcacgcgctatacttaacgataaaaaacgaggaggaagctcctcgtttttgctattggaggagagaaaaatgggtcaactgattgacggcgtctggcatgacacctggtacgataccaaatctaccggcggtaaatttcaacgtagtgcttccgcatttcgtaactggctcactgccgatggcgctcctggccccactggcacaggcggttttatcgcagagaaagatcgttatcatctctatgttagtctcgcctgcccgtgggcgcaccgcacgctgatcatgcgcaaactcaaaggactggaaccgtttatttccgtttccgtagtgaacccgctgatgctggaaaacggttggacctttgatgacagttttccgggagcaaccggagacacgctctatcaaaatgaatttctgtatcagctttatctccacgccgatccacactacagcggacgagttactgttcccgtgctgtgggacaaaaagaaccacaccatcgtcagcaacgaaagtgcagaaatcatccgcatgttcaataccgcgtttgatgcgctgggcgcgaaagcgggtgattactaccctccagccctgcaaacaaaaattgacgaacttaacggctggatttatgacaccgttaacaacggcgtgtataaagctggttttgccaccagccaggaagcttacgacgaggcggtggcgaaagtgtttgaaagcctggcacgactggagcagattttaggccagcatcgttacctgaccggcaaccagctaaccgaagccgatattcgcctgtggactacgctggtgcgttttgatccggtgtatgtgacccacttcaagtgtgataagcaccgcatcagcgattacctgaatctgtacggttttctgcgcgatatctaccagatgccggggatcgccgaaacagtcaatttcgatcatatccgtaatcattacttccgcagccataagaccatcaaccctacggggattattagtattggtccgtggcaggatctcgatgaaccgcatggacgagatgttcgcttcggttaaaaaaaggcaccttacgaggtgcctctgataattagctaagtgcatgttgttcatgtcggatgtggcatgaacgccttatctgacatacaaaacattgtacattcaatagattgcataacccgcgcagaccagataagcgtagcgcatctggcgattttgcgcttgtcatcagtcttagcgcgccttcacggcactttattaattccttgaacgaatatttactgccatttcattcacgtctattcttaatttgctgctttaaaaacaagtgattgagcaaaattgaggcaaaaatggactggtatctgaaagtactaaaaaattatgtcggtttccggggtcgtgcgcggcgcaaagagtactggatgtttattctggtcaacatcatctttacgttcgtgctggggctgctggataaaatgttaggctggcaacgcgctggtggcgaaggcatcctgacgacaatctacggtattctggtgtttttaccgtggtgggcggttcagttccgccgcctgcacgacaccgaccgcagcgcgtggtgggcactgctattcttaatcccgtttatcggctggcttattatcatcgtctttaactgccaggcgggtacgccaggcgaaaaccgctttggaccagatccaaaactggaaccttaaaacaaatctgctcgccggatgtctgactcatccggcttttatcattatgttgatgaatgaataatttactaatgtttatttaaaatatttcaatgtcgttatataaattacctataaaaaataaccatgtatttatcttaaatatcaaaacctttataacatccgaaaaagaaagatacgaatagcatttacacaatacccggaatagactttcgtcacttttaattaaagggatgtttttatgcagtggtatttgtccgtattaaaaaattatgttggtttctctggtcgcgcacgtcgtaaagagtactggatgtttactctgattaacgccatcgtcggcgctattatcaatgtcattcaattgattttaggtctggagcttccatatctgtctatgctttatttgctggcaaccttccttcccgtccttgcgcttgctatccgtcgcttacacgataccgaccgtagtggtgcctgggccttgctcttttttgttccgtttattggctggctcgtgcttctggtttttttctgcacagaaggtacttctggcagcaatcgttacggaaacgatccgaagtttggtagtaattaatcttagaattggggcgatatttcgcccctttttattaacaataataaatattattttccgttaaaaagtttgggaatttcccgcagacaccaggatttcgcttcccccatactgtcacgacgccaggccataataatatcgatctcgctggtgctttccgggctgacgacacgcaaccgcccttccgcaatatctttttcgaccataggatacggcatcgtcgccacgccaagccccgccagtaatgcctgacgtttatcttcaatcgtgctcaccgttaagcgcggctgtttgtccagcagctgtacggtcaacaccgggcgctcacgagcggtatccgccaccgcaattccacgatatttcacacgcgtcacttcagataacggttccggctcctgatgaatcgggtgatcaggcgcggcaacgtagacgttcattaacgtatagagcttgcggctgttgatctcgctgctggaacgaaaatgcatatccggcgcgataacaatatccgcccgcccctgctccagccgttcccacgcccccgccagcacttctgtgatgattgccagttgggtattggcttttgccgccagtttgtcgattaacgggaaaaaggcaggtgtcggtaccagcgcttcggtcacaatggtgagatgcgtttcccaaccgcgcgcgagagcttccgcatcagtagtcagtttatctgcggcttccagcaaaacgcgccctcgctccaacaacatcctcccgacattggtgaatttggtacgatggccgctgcggtcaaacagcaccacatccagctcttcttccagtttttgcatggtgtagctaagtgcggaaggcacgcgtcccagctcatccgccgccgccgcaaaactgccccggcgatcgatcgcatccataacccgtagtgcttccagcgttaatgccctttctttggccatttcgttctcattcaggaaatttgaacataccgggcagaatatctggctaacaatgtagcgtccagccccttaccataaaaggaagtaaagagaggtcaagaattatgattactacccgaactgccaggcagtgtggacaagcagactacggatggttgcaggcccggtatactttttcctttggacactacttcgacccgaaattgttaggctatgcctccctgcgtgtgcttaaccaggaagtgctggccccaggtgccgcctttcagccgcgaacctatcccaaagtcgatattttaaatgtgattctggatggagaagcagagtatcgcgatagcgaaggcaatcatgttcaggccagcgccggagaggcgttgctgctctctacccagccgggtgtcagctatagcgaacacaatctcagcaaagacaaaccgttaacgcgaatgcagctttggctggacgcctgcccgcagcgagagaatccgctgattcaaaagctggcgcttaatatgggcaagcagcaattaatcgccagcccagagggtgcgatgggaagcctgcaattacgccagcaagtgtggctgcaccatatcgtgctcgacaaaggcgaaagtgcgaatttccagttgcatgggccacgcgcgtatttgcaaagcattcacgggaaatttcatgcgcttacgcatcatgaagagaaagcggcgctgacctgcggtgatggggcgtttattcgtgacgaggctaacattacgctggttgccgattccccactgcgcgctttgctgatagatttgcctgtctaattgtttttacagggagatgatgatgagtaaaaaattggccaaaaagcgccagccggtgaagcccgtggtggcgaaagaacctgctcgcaccgccaaaaattttggctatgaagagatgttgagcgagctggaagctatcgtcgcggatgctgaaacgcgtttagccgaggatgaagctaccgcgtaaagacaggttgccggatgcggcgaaaacgccttatccggcctacaaaatccaacaacattaacgaattaaacaacccgtaggccggacaagatgcgccagcatcgcatccggcacgatccccaaaacctggcgtttatctggccttgctcgccataatctcgataatctgccgatccgtttgctgcatgctatggcttgctaacgcacacaggttggcaatgctctgctcaacatcatgcgccacaatcccttcattgccggtcacggcggtatcatccagcgccattaacaccgctttccacgcagcgctagcactggtgctaaccttcatcgcgcagctgttgctcgcaccatcgcaaatcatgccgctgacatcgccgatcatactgctgatcgccatgctgatggtttcataacgcccatccaccagccatgccatcccggcggcggcccccattgctgcggtcgttgcggcacacagcgcagacaaacgcggtaactggttatggatgtaaattgcgctcaaatggctaagcatcagcgcacgcgccagccgttcatcatccgctccgaagtgttctgctaccaccaccacaggcattgttgcggtaatcccctggttaccgctgccggagttactcatagccggaagcgtagcgccgcccatacgcgcatcggatgccgcgctggtacgaatcacaatggaactagagagatctttcgccagcaaaccgcgctcgcactgtttttccagcgtcgcgccaatatgcagcccccacttaccgctcaaaccttcctggcttaacgcacaatttagcttcgcggaatcgagaataaagcggatcgccgcaaacgggacttcattgacgaacttcaggatctcagccagcgtcgttctggaaagcaccgtcagcggagactcttgctcgccctctgccacacacgcctgctgggtaaacaccacaccatcgtgcgtctcgatatgcacaatgttggtatgcccgccgacgatggtgacacacgcccacttctcaccgttccagactttggcgcgactgaagaggatttcatcgcaaggttcctggatcttaacggagactttccccgccgccagcagtgctttggcatcggcaattgcctgcgctgttgcgtctttcagcacttccagcccggcgttggcatttccacctaacgcccccagcgccgccgcaatcggcagccccaccattcccgtgccgggaacggtgacgcccagaccgttcttcatcagatttgggctaacccaggcttctacacgttcaaccggaccttccagttctgccgcagcaaccgccgccgccagcgccagactaatcggttcagtacatcccagcgccggttttacttcctcctgaacggcgaggatgtaacgctgccataacggatttaaagtgctatcaaacatattaaaaaccttaaaatttcaggtaaatcaagaaaatgccaggaacggagaaacacacagcaacaaaccagtgacgataatcaggtacagagacatccctttgtatttgtgcaatgctggtactttgtaaaccagccacgccgggatcaggcaccctaccatgccgaaaatcgggctacagatagaggtgaagctcaacaccggtgcgttcagtacgatggcgctccaggccagcaaaatggcgaaaatcatgatgccgcgctgaacgagattttcgttaatcttctcggcaggcatcttgcgacgcaggatgttcattacgatcccttgcgttgcttcgcgaaagcctaaatagacgccaaagaatgcagtcatgacagcaaagatattgagaatgacgctgaccactttcacccacgctgcgccgtcaccgctaataaactgtgcggcaatcgccagcgcggaaatattctgctcataggcttttaccgcttcgtcatgtcccatcgccagcgtgaagctcacggcgtagaaaaagacggtgacaaacaaaatgccaaacgcgatattcattgcccgcaatgctttatgccgcgccacttcaatacttttttcccggctgcgataagagatcaccatcggacttaacgtctggataaacagaatgctcgtcagggtaaacggcagcgtaataatggcgtttttcaccagcagccccagcggcggtaggctaccgacgttatacagatgccacattcccaccatgctcacgcccagcgccgcgaccaccagcagcttggtcagcaccatgccggtgctaattttgaataacaatttctcgccgcgactggagatcgccaccagaatgcaaatcagtaccagaccataaaagggactgtcactcagcaacccttccgtcacgccgaaggtatgcaggtaggaagcactatcgttggtgatggcggtggaatagacgaacatccaaatcaccagcattacgaaatagagcgcacctaacaggatgccccagtttttacctaaataaccgctaatgacgctcgggtaatctttacattctggactttctgccagcgtattaataaacaatcgctgaaacagatacattgccgggtaaccaatcacgctactgagcaaaaatacccacaatcccatcaaaccgacctgcaccgggagaaaaacaatccccgcgccaatcgccatcccgatactcataatcacccagccggtgtcagtactgtcgaatttgatcgcttctcgccactcgctctcactcattccagcacgacccgccggggtcgaagcgtctgcaatgacgcctttattcgatgcaatttccataatttctcgctcaatattttgtagggcttattatttttttccgagccgcatcaaggcgatatgcggtctacgtttttgcaggcgagttattagaataaagaaatgatacgcgcgaggtcagagaaaatcttcacaatcaagactttgaaataacggagatggataagaattttctactaaattaatcgcaggagaatattcattctctatttgcggcagatcacaaaaaaaaggtgcacatttgtgcacccaaggatgaaagctgacagcaatgtcagccgcagaccactttaatggccagtcctccgcgacttgtttcgcggtatttatcgttcatatctttgccggtttcatacatcgtctcgatcactttatcgagactaacacgcggtgcgctggtgcggcgcatcgccatccgcgcggcgtttactgctttcacggcattaatggcattacgttcaatgcacgggatttgtacctgtccggcaaccggatcgcaggtcagcccaaggttatgctccatcgcgatttccgccgcattgcatacctgcgccggactgccgcccagtagttcagttaaccctgccgccgccatactacaggccacgccaatctccccctgacagccgacttccgcgccagagatggaggcgttcattttatacagcgcgccaatagcccccgcggccagaaaatagcgggcaatactccgctcgtttaccggacgacggaacttatcgtaataagccagtactgccggaataatgccgcacgcaccgttagtcggtgccgttaccacgcgcccgccagctgcgttttcttcactaaccgccagcgcgtacatgttgatccagtcgatgacattcatcggatcgttagagatgttatcgctggaaaccagctgacgacgcagcgctacggcacggcgcggcacattgagcggaccaggcagcacgccttcagtgttcatcccacgttcaataccgtcatgcatcacttgccagatacgggcaaaaccggcgtcaatttccgctttgctgcgcagcgctagctcgttgtgcatcatcagaccagatatagacaggccgttgtaatcacacattttcagcagttcacctgcactgtggaaatcgtaaggtacggacgtttcgacatcgtggctcaggccgaagtgttcttcttcgacaataaacccgccgccgacagagtaataggttttacttaatagctcttcctgtcccttccaggcagtgatccgcattccgttctcatggcgaggcaacatttcgggatggaagataatgttctttgctacaggaaaatcaacaatatgcgcaccagatgccactggcagccgcccgctgcgcgttactaactctataaatgcagggatctcatcaatgacaacatcctgcggactgtttcctgccagtcccatgatgatggcgacatccgtggcatggcctttgcccgtcagactcaagctcccgtacagatcgaccacaatatggctcgtcgcggttaataagccgctactttccagccgatcaataaaactttttccggcattcattggccccacggtatggctactggagggaccaatcccaattttgaaaatatcgaatgcactaatcatatccacaccctcggattgccgttcagtgaagtggagcggaacgaccttacgaccgtcccgctcacgaggctttacgcactacgtactgcgatggcttcaatttccagcttcacatctttcggcaaacgcgcgacctgcacacagctccgggtcggataggtcgcctgatgctcatcgaagaactgcttatagacttcgttgatggtggcaaaatcattcagatcggtgataaacacggtcatcttgatgatatcgcccacgctcagcccggcagcaaccacgatcgctttgacgttttcgaggcttaaacgcgcctgatcttgcacatcagccgggatctcaccggtctgtgggcaaaccggtatttgcccggaggtgaagaccatgctgcctaaatcaacgccctgaacataagggccgattgcgcctggggcacgttgcgtttcgataatctttttcatacatcctccggcgtcagagcgcctgggtaaaggtacgactaataacatcctgttgctgttcacgggtcagtgcgttgaagcgcacggcgtagccagagacacggattgtcaggttaggatatttttccgggtgctcgatggcatccagcagcatttcccgattcattacgttgacgttgaggtgttgaccgccttcgacatccgcttcgtggtggaaatacccatccagcaggccgacaaggttggttttacgtactggatcttctttgcccagcgccgcaggaacgatactgaaggtgtagctgatcccatctttggcgtaggtgaacggcagtttcgccacgctcgtcaaactggccacggcacctttgcggtcacgaccatgcatcgggttagcgcccggcgcgaacggtgttccggcgcgacgaccgtccggcgtattaccggttttctggccgtacaccacgttagaagtgatagtcagaatgctctgggtagggacggcgttgcgataggttggcagcgctttaattttcttcataaagcgttcaaccaggtcgcaggcaatgctgtctacgcgctcgtcgttgttgccgtactgcggatattcaccgtcgatttcaaagtccaccgccaggccgttttcgtcacggattggtttcacgcgggcatatttgatggcagacagggagtccgtcgccacgctcaggcccgcgatgccgcatgccatagtgcgatagacatcacgatcgtgcagcgccatcaggctagcttcgtagctgtacttgtcgtgcatgtagtgaatgatattcagcgcgctgatgtactgcaccgccagccagtccatgaagtgatcgaggctgtccatcactttgtcgtaatccagcacgtcgtccatcagcggtgctgttttcggcccgacctgaatcttcagcttctcgtccaccccgccgttaattgcgtagagcagcgttttcgccaggttagcgcgtgcaccaaagaactgcatttgcttaccaatcaccattgggctgacgcagcaggcaatcgcgtaatcgtcgctgttgaagtcagtacgcatcagatcgtcattttcatactgcaaggaagaggtgacgatgctcacctgcgcggcatattttttgaaggcaatcggtaattcttcgctccaaagaatggtcaggttaggttccggtgccggccccatagtgtgcagggtgtgcaaatagcggaaggagtttttggtcaccagcgtacgaccgtccagccccatcccgccgatcacttccgtcgcccagattgggtcgccggagaacaggctatcaaattccggtgtacgcaggaagcgtaccatacggatcttcatgatgaagtgatcgatcagttcctgtgcctgctgctcattgagtacgccagctttaaagtcgcgctcaatgtagatatcgaggaagcttgccgtgcggcccaggctcatcgcgccgccattttggcttttcactgccgccagataagcgaagtagagccactgcaccgcttcctgcgcattctgcgccgggcgagagatatcaaagccatatttcgccgccatttcctgaatctgcaacagcgcatgacgatgctctgccagctcctcacgcagacggatggtggcttccagatcctcgcctttttccagacgagactggagatcggcaaattgcagttcgcgttcacgtaccagataactgatgccatacagcgctacgcggcgatagtcaccgataatgcgcccacggccatagccatctggtaaaccggtcagcacgccagatttacggcagcgcagcatatccggactgtaaacatcaaatacgccctggttatgggttttacgcagatcggtaaacagatattcaaattcactgtccatttctcggccataggcgtggaaactacttttaatcatattaatgccaccgaacgggtgtagcgcacgtttcaacggcgcatccgtttgcaggccaacaattttttccagcggctggttaatatatcccgcatcatgagcggtaattgtggtggcaatattggtatcgaaatcaaccggcgcgtgggttgcattttcgatacggatgccttccattactttttcccacaattccgtggtggcaggcgtcgcttcggcgaggaaagattcatcgccttcatacggtgtatagttatgttgaataaaatcgcggacattaatttcgtttttccagtccgtacctttaaagccaagccatgcgtcggcgtacagcttatcgctggtatcaatatctaccttcatgaaaaataatctctctacaatacttcaactaaattatgcaaattctgcgggcgcgttaactttgcctaaatgaatggcatccaaagcaatcattttttcttcgttagtcggaataacggcacaaatgacacgcgcattttcactggaaacaattcgctcaccacaggagttagagcgattattcatttctgtatcaatctctaagcctaatacagccaaatgttccatgaccagacgacgaattaagctactattctctcctattccgccggtgaatataattccatccaggcgacgtaaactagctgcgtgtccggcaatatgacgggcaattcggtgaacaaaggttttaattgccagttgcgcgcgttcgtgaccttcatgccaggctttttccagaacacgtaaatcgctagaaagaccggaaatacctaataatccgctctctttattcactacgcgttccaggtcacccaggctctggttggtttggctggcgacccaggacatcgcaccaaagtcgacatcgccactgcgggtacccatcatcaagccttccagcggcgtcattcccatactggtatcaacactctgaccgttgcgaaccgcgcagatactcgcgccattgccaagatgcgccacaaccaggccggagtcatcttccgccagattcagcaggctatgtgcgcgctgggaaacatagcggtggctcgtgccgtggaaaccataacggcgtacacctaactcttcataatatttccacggcaggccgtataaataagcttccggagccatcgtctggtggaaactggtatcaaataccgccacctgagttacgcccggaaataattgctgcgcgctttcaataccacttaaattggcgtaattatgcaggggtgccagtggagaaacgcgacggatattatcaatgacttcatcggtaataatggcggactcggtaaaaatactgccgccgtgagcgatgcggtggccaattaaggccacactgtcatttaaattccgtttttccagttcaaatgcaattgccttcaatgcaccttcgtagctgtggtgagccagcggtgctggctctcccccatttacggataagaatgcattttcgctgttaataccgtcggcaataccactcattaatacttcacagtcgctggcatcgagcacggaaaacttaatgctagagctaccacagttaataaccaaaacaaccggaaattcattcatctcttttctcatcctgagttacggattaaaacagtttgtatacgatgttcaggatggtcagcagaccaatcacggtaacaaacacgttatccagacgaccacggtatttcgccagagacggcgctttacggatggcatacatcggcaacaggcacagcagggatgcgataatcggtgcgcccatggcttcaatcaggtcaaggatgttcgggttggcgtaggcaacaacccaggtggagcccatgatgaagatcatgctgatagtgttcagtttacccaggctcactttagttttgtcgcctttataaccaaacttcaggaccaggccattcagaccttccagcgttcccagatagtgaccgaagaaagatttgaagatagccacgagtgcgatgatggaagccgcatattccagtgtaatcgcgaacgttgttttggtaccggtcatggacgcaaagtggttagccagataagaaagcactggaatattctgcgctttggcttccgccatgttggccggagacagagtaaacaggcagctaaaggcaaagaacatcaccactgcaaccatcagcatgctggcacgagaaatgatttgggaacatttacgttcggtgaagtcgcgaccgaagtctttctcatactcttcacgcttagaaaccacgaaggaagagacgattgggctgaagttaaaggagaaaaccatgatggaaatccccagccagacagtgatcaggataccgtcatgaccggttaagctcaggctaccgaggtcaacctggtcgataactgcagagttccagtaagggatcaggctcaaagaaatcagcaccaggctggcgataaacggccataccaggtagctcatcactttaaccatcagatccttaccaaaccagatgacgaaagccatcagcagcaacaggaacagcgccacaaagccgcgattcagcggtgcaaagccgagctggttttcccagaacgtcataaaggtattggtaatagtaacgccataaatccacagcagtgggcaaatcgcgaagaagtacaggaacgtgataaccacgccgccagttttaccaaaatgctcttccaccgtttccgtaatgttgccggaagggttagagccagaaagacacagacgcgccagcgcccggtggcaataaaacgcgatggggtatgccaataccaacatcagaagaatcgggatcagtccgccaaaacctgcgcggatagggaagaacagcaccccggcgccgattgccgtaccaaacaagcctaacgtccatgtggtatcacttttacgccaggagctttgttttgtctggctggatacaatgctatcactagtactcatatcctatcctcaacgaattaattaagcgtcaacgaaaccggtgatttgagagacgcgagaaagatcgatattgccgccggaaataatactgacggtttttctgttttgaatatattggtctaatttaccgcttaataatgcagcacatgccagagcgcctgcgccttcggtgacgactttattgcgctgaattaaggcaatcatactgtttctgatttcgtcttcgctgaccagcacgatgtcatcgactaattcacgaacgatttcgtaagttaaattacccgggcgggagacatcacaaccatccgccagggtgccggtagttcggtgcgtggttatttctccggagtggaaagaagccgccatgccgtgaacgttttcagactgtacgccaataacacgaatggtcgggttaatagatttaattgccaccgcaataccagcaattaaaccgccaccaccaattggcacaatcacgttatcgacatcatagagatcttccataatttccagaccaatcgttccctggccagcaatcactttcggatcatcgtaaggtgggataaaaatacggccttccatttcgacaatttcgctcactttagcgatagtgtcgttgaagttatcaccatgcagaacgacttctgcggagtagtcgcacgttgccgctactttggattttggcgcaccttttggcatcaccactttaccgtcgatacccagcatcgcgcaggagagggaaaccccttgcgcatggttgcccgcagaacaggccaccacgcctttgcgtttttccgcatcggtcagactacttaatttattaaatgcgccacgaattttaaaactacccgtacgctgcatattttcaaacttcaggaatatttcacctttgcaacgttcactaaaatagttggagcgaggcatgcctgttttataaattcgcccagccagtcgttgtttcgcttcaataatgtcatcaatagcaaccggcagatcgtatgtaatatgcattataaaacctcttcgcctgaattaaatatgtaggtaaccgtaaccgacacctgcaagacagacaggtggattatttatgtttaaataaaaacaaataattaaccaacttctattaattgccttcgtctacacccattataagaactatactctttggctaattccaccaaaacgcttgctgcttttttaatacgataatttttgctccataccgcggcatattgtgccacaggtaatgtttcttcaaccggaatagtaataaattgattagaaccaaaaggactcgtcatatcacaaggaattacagttaagaaatcagcattgagaacaagattataaattgtcacgacactgtcggttttaacgatgttttcaatactgatgccatttctttgtaacgtagtaagcagttcgctgtagtaccccatattagtttgtggcaacacccactgttcgttcttcaagctctccagcgtggtggtgccggtgcatgttcgggacttactggctaccagcacaaactcggactcgaacagcggctcaacatgtaaatcctgaagcttcatttctgcacttaacgtaccaatcgcaaaatccagtcgaccgtcgcggattgccggtaagaagctagacagttgcgcttcatacatagaaacctgcgctttcgggaacacctctttgaacttgttgatcatcccactcataaaagtaaaaccaatcaaactaggaaaaccaaaactgacttccaccaccgcctcagaagacataccgcttatctcattaaccatatttttcatttcacgggtaatggattcggaacgggagagtaacaattgaccggcaggtgttaatgttacaccggtatttttccgcaccactaattccacaccaaaataatcttcaatatcgttaatgattttactgacggccggttgagttaaccctaattcttttgcagcgctgccgatagaaccacttctaatgacttcctgaaagactaccaggtgctgcgttttcggaagaagaatagtgctcataacgacctacgttaattacctcattgacggcatgaagtgtatcaaaatgaaatgaacaggatatgtgcgaccactcacaaattaactttcaatactttccagagtatcgttattacaattaaatacctttaaatatcaacaagttaaagtataaaaatcagcataaaccctgatttttgtcaaaaaaaatgacggggataaccatattttatggcgataacatcattcgttatgtggttaatacaaaaaaggggctgagaccatatttcaagcaattaccggataattaccaggcaaaatttgagttaaatttaatgagcaagttcagtaattttattataaataaaccatttagtgtgataaataatgcggcatgtcacatttttagtcgctatttgttggagaacaaacatttattttatcaatattttaaaattagcaatacatgtattgatcatctcgaacaattgattaacgtcaactttttctcttctgacaggacgagtttttgtgaatgcaatcgttttccataaattcttctcccctcataggcgacgaatagcattttgtgttgaggattacaaaacgaataattgctgatcgccgcgataaggtcagacaaagacaacaagggaaattttcacagagcttttgatcggcgtaggccacagaatgttgcttcgtttactgtaacgccgggtaaatgagcgttttttgatagtgcgaaagaaccctgcgaggaaaataagcatctattattgtttgtcatgatgacaaggcaggcatcaatgaaaggcttcccaattgcgcatatttttcaccctagtatcccgccaatgcacgcagtggttaacaatcacaatagaaatattgattattggacggtaaaaagaaagtttgcagaaattgtctccaccaatgacgttaataaaatttacagtataagtaatgaactgcggagagtattatctgcaataactgcattgaatttctatcatggcgatgttccttctgtcatgatccgaatccaaccggaaaatatgagtccattcattatagatatttctacaggagaacatgatgattatatcatacaaacattagatgtaggcacttttgcaccttttggtgaacaatgtacttgcagtgccgtcaataaaaaagagctggaatgtattaaggagacgatttctaagtattgtgcaaaattcacccgaaaagaagccatcttaaccccccttgtgcactttaataaaaccagcattactagtgattgttggcaaattctcttttttagtcccgatcattttaataatgatttttattgattatttataaaggataaaataatgttccctgttagtagtattggtaatgatattagtagtgatttagtccgtcgaaaaatgaatgaccttcctgaaagcccaacaggaaataacctcgaagcactagcaccaggtatagaaaaactaaaacagacctctattgaaatggtcactttacttaacacgttacaacctggtggaaaatgcattatcactggtgattttcaaaaagaattagcgtacttacaaaatgtaattctttataatgtcagctctcttcgtctggattttttaggttataacgcccaaattattcaacgaagcgacaatacttgtgaacttaccattaatgaaccgttaaaaaaccaggaaatatccacaggtaatatcaatattaattgcccattaaaagatatttacaatgaaatcaggaggttaaacgtaatttttagttgtgggactggagatatcgttgatctatcctctctggacttacgtaatgtcgatttagattattatgatttcacagataaacatatggctaatactattttaaatccttttaaattgaatagtacaaattttactaatgccaacatgtttcaggttaattttgttagtagtacacaaaacgccacaatctcctgggattatttactaaaaataacgcctgttttaataagcattagcgatatgtattctgaagaaaaaatcaagtttgtcgaaagttgtttaaatgagcctggagacattaccgaagaacaattaaaaattatgagatttgcaattataaaatctataccaagggcaactcttacagataaattagaaaatgaattaacaaaagaaatatataaaagcagtagcaaaatcatcaattgcttgaacagaattaaattaacagagatgaaagaattcagtagtgaaaaaatatatgattacatcgatataatcattgaagattatgaaaataccaaagaaaatgcttatctggtcgtcccccaaattaattatactatggatttaaacatagaagactctagcagtgaagagttacttagtgataataccctcgagaaagacgaaaattctccggacaatggctttgaggtcggggaatataacacatatgaagcatataacagtgagaagcaatattttaccagagaggactatacgtatgattacgaccttttaaatgcaatataaacttaataacttcttacaaagtctattattaataccgtagatatttattcatcttaccctgtgcaccaaaagcaaaaactcactgacgcgggtttgaaactgatggcaaccgcaaaaatgcctgatgcgctacgcttatcaggcctacgccatctctgcaatatattgaatttgcgtgcttttgtaggcaggataaggcgttcacgccgcatccggcatgaataaagcgcactcaacaatctgaaacccgccggaacggtttattacgtacatcaggtaaaactgaccgataagccgctttcttttgggtatagtgtcgtggacagtcattcatctttctgcccctccaaaagtaaaaacccgccgaagcgggtttttacgtaaaacaggtgaaactgaccgataagccgctttcttttgggtatagtgtcgtggacagtcattcatctttctgcccctccaaaagcaaaaacccgccgaagcgggtttttacgtaaaccaggtgaaactgaccgataagccgctttcttttgggtatagcgtcgtggacagtcattcatctttctgcccctccaaaagcaaaaacccgccgaagcgggtttttacgtaaatcaggtgaaactgaccgataagccgggttctgtcgtggacagtcattcatctaggccagcaatcgctcactggctcaagcagcctacccgggttcagtacgggccgtaccttatgaacccctatttggccttgctccgggtggagtttaccgtgccacggactgttaccagccgcgcggtgcgctcttaccgcaccctttcacccttacctgatcccgcttgcgcgggccatcggcggtttgctctctgttgcactggtcgtgggtttcccccccaggcgttacctggcaccctgccctatggagcccggactttcctcccctccgcccgtctcccccgaagaggacgacgacgaagcggcgactgtctggtcagcttcggcgcgcagtatagagggtttgcgcgcccttgtcaccccgcgttgcgcattccaatcgccagtgtcgcggcgatattacgactagcacggcagatattgtcataagccccgcggaatgcttcgtccaacgtacctatgctggtcaatacgctgaagaccgcatcaatgccatgctgatgtacaacgccaacatcatcggtcaggctacccgcaatgccaatcaccggtttatggtacttcttcgccacgtttgcgacaccaatcggtaccttcccgtgaatactctggctgtcaatacgcccttcaccggtgatcaccagcgtacaatcgtgaatatgttcctccagattcagcgccgtagtgacgatttcaataccacttttcagttccgcaccaagaaacgccattagcgccgcgcccataccacccgcagctcctgcaccggggacatctttcacatcaacatgcagcgcttttttaatgacctcggcatagtgagagaggttattgtccagctcaacaatcatcgcttcactggctcccttttgtgggccaaagatgcggcttgcgccgttatcgcccaccagcggattggtgacatcacaagcgacgcgaatgacgcaatcttttaagcgcggatcgaggccggaaatatcaatatcattcagagtattaagactaccgccgccaaaaccaatttcattgccgttggcgtcgcataatttcgcccccagcgcctgtaccatgcctgcgccgccatcatttgtagcgctgccgccaatgccgataataatgtttgtcgcaccgctctccagcgcctgcaggattaactcgcctgtgccgcgactagtggtcacgagtggatcgcgtttttccgcaggtaccagctccagcccactggccgccgccatttcaataaacgcggttttgccatcgccggagatcccccaactggcattcactttctcgcccagcggccctgtaacccaggcgtgacgttcagccccctgggtggctgcaatcatcgcttccaccgttccttcgccaccgtcggcaaccggaacagaaacgtactgtgcatcaggaaaaatttcccgaaatcctttttctatcgcctgcgcaacctcgctggcagataaactttctttataagagtctggggcgattacgattttcatacctatgcctgttaccacatgacgccggagggcgtttctcttattcggcctggattccaggcccggattgcaatacgccatccgggcacgacgtcattaacgagtaacttcgactttcgccagtttttcgtagtagcacgccagggcgctatgatccgccgttcctaaaccatctgctcgcagtgcctgcatcatctccataaccgcagctgtgagcggcagttgtgcgccgacgccgtgagaagtatccagcgcattcgccagatccttaatatgcagatcaatacggaagcccggcttgaagttgcggtccatcaccatcggcgctttggcatccagcacggtactgcccgccagtccaccgcgaattgcctgataaaccaggtccgggttaacgcccgctttagttgccagcgttaacgcttcactcatcgcggcaatattcagcgccacaatgacctgatttgccagtttggtgacgttacctgcaccgatttccccggtatgcaccacggaacccgccatcgctttcatcaaatcatagtatttgtcgaaaatagccttgtcgccgcccaccatcacactcagcgtaccgtcgatggctttcggttcaccgccgctcaccggagcatccagcatatcaatgcctttcgctttcagcgcttcgctgatttcacggcttgccagcggtgcgatagaactcatatcgatcaataccgtacctggcttcgcgccttcaataatgccattctcacccagcgccacctctttcacatgaggggagtttggcagcatggttatgatgacgtcgcactgttcagcgatcgctttagccgtagacgctgtttctgcacctgcagcaatcacgtcagcaatagcttctgggttacggtcagcaaccaccaggctgtaacctgctttcagaaggtttttactcattggtttacccataatccccaggccaataaaaccaactttcatagtcatatcaatcatctctcttgttgcggtggtggttattttttaaaggtatcagccagtttctgagtggcagagcggaagacgccgagatcgctgccgacagccacaaacgtcgcgccccattccagataacgacgcgcatcggcttcgaccggcgcgaggataccgctgggtttgccgtgcgcgctggcacggttaaaaatgtgctgaattgctttttgtacatccgggtgacttgcattgccgagatggcctaatgccgcggccagatcgctggggccgacgaagatgccgtctacgccttcggtagcggcaatggcatcgacgttatctacgccctgctgactttctatctggaccagaatagtgatgttcttgttgctctgagcgaaataatccgccacggtgccaaacatattggcgcggtgagaaacggagacgccgcgaatgccttccggtgggtaacgggtacttgccaccgccagctctgcttcctcttttgtttctacaaaaggaatcaggaagttatagaaaccgatatccagaagacgcttaataattaccggctcgttggtcggcactcgcactactggcgcgctggcgctgcctttcaaggccattaactgcggaataaacgtggagatatcgtttggcgcatgttcgccatccagcaccagccagtcaaacccagccaaaccaagaacttcagtgctaatcgggttagagagtgcactccagcaaccaatttgtacctgtttcgcagccagtgcggctttgaatttattcgggaaaacatcgttattcatcgcttatacctttgcttatttctgcaattccatacgtttaatgtcgccaactacgaagaggtagcagaccatcgccatcagcgcactacatcccacgaaaaccagtgctgcattgaaggagtgcagttcacttaccaggtagccaatcaccagtggagtgacaatggaggcaacattgccaaagacgttaaagacgccgccgcagaggccaacaatctctttcggcgcggtgtcagaaatcaccggccagcccagcgcaccaaatcctttgccaaagaaagccagcgccatcagcatgaccaccagcgtggtgttgttggtgtagttacataagatgatggtggaagccagcaacattcccagcacaatcggtagcttacgtgccagggtcagggataaaccgcgtttgatcagataatcgctgaagacacctcccagcacgccgcccgcaaaaccacacagtgctggaatgctggcgaccagacccactttcagaatgctcatgcctttttcctgcaccagataaatcgggaaccaggtgaggaagaaccaggtgatggtgttgataaaatattgtccgaaaaatacgcccagcatcatgcggttagagagcaattgcttgatgtaatgcagtttgggtccgcttgctgccgcactgcccggctttttgtggtccatatcgaccaccgcgccattttcagagataaacttcagctcttccgcagacatacgtgggtgatctgtcgggttatgaatcaacttgatccacagcgccgtcagcacaaaaccaatcacccccataacggtaaagacgtgctcccagccccaggcgaaagtcagccagccaagcagcgggctaaagagcgccaggctgaaatattgcgcgctgttaaagatggcggaggcagtaccacgttctttcgtcgggaaccaggcggcgacaattcgggcgttcgccgggaaacttggcgcttcgctgaagccgagcataaagcgcataaagaacatggagatccctgcccaggccagcgggaacatatcaacaaagccttgcaggaaggtgaataggctccagaaaaagaggctgtaggtgtaaacttttttgctgccaaacttatcaagcagccagccgccggggatttgcatcagcaagtaggcccagccaaaagcggagaagatgtaacccatgctaaccgcacttaactgcaactcttttgccacttcggtaccagcaatagacagcgttgcacgatcggcgtagttaacggcggtaacaataaaaataatcagtaatattaaatagcgggtatgcacgcctttctttttttcgtcaacggtgtccagaatcattttatttacctcgggtacttatgctgatttttattattatggggaaggtgttatttatgagtttcatttatgccgtaacgacaatgaactcgggaattagtataagcagcgcgagaataataatcattgtgcaaatgctaatttaattaatactatttaaatattattttgagcatatgcacataaggttgcgcgctaaagcacagatttgcgctttaccttaccgggcggcactgcaatccctgaaatgattgacattgatcacatttctgcgtttaaactcctgacattcttatttcacccaatgaagtcatttatttttaaatgagaccaggtcctcattttaataacccctggctggagaatattgcacaatggccaacatcgaaatcagacaagaaacgccaactgcgttttatataaaagttcacgacacagataatgtggcaattattgttaatgataatggcctgaaagcaggaacgcgttttccggatgggctggaattaattgaacatattccccaggggcataaagtcgcattgctggacattccggctaatggtgaaattattcgttatggcgaagtgattggttacgccgtgcgtgcaatcccacgcggaagctggatcgacgaaagcatggttgtactaccggaagcgccgccgttacacacgctgccactggcaaccaaagtcccggaacccttaccgccgctggaaggatacacctttgagggctatcgcaatgccgatggcagcgtgggcaccaaaaacctgctcggtatcaccaccagcgtccactgtgtggcaggcgtggtggactatgtagtaaaaatcattgaacgcgatctgctaccgaaatacccgaacgtcgatggcgtggtggggctgaatcatttgtacggttgtggcgtggcgattaacgcaccggcggcagttgtacctatccgtaccattcacaatattagcctgaatcctaactttggcggcgaagtaatggtgattggcctgggttgtgaaaagttgcagcctgagcgcctgctgactggaacggatgatgtgcaagctattccagtagaaagcgccagcattgtcagtttgcaggatgaaaagcatgtcggttttcagtccatggtcgaggatattttgcagatcgccgaacgccatctacaaaaactgaatcaacggcagcgagaaacctgcccggctagtgaactggtcgttggtatgcagtgcggtggcagcgatgcgttttctggtgtaacggcaaacccggcggttggctatgcgtctgatctactggtgcgctgcggcgcaacggtgatgtttagtgaagtaacggaagtgcgtgacgcgatccatctgctgacaccacgcgcagtgaacgaagaggtcggcaaacggctgctggaggagatggagtggtacgataactatctcaatatgggaaaaaccgaccgcagcgccaaccctagcccgggcaacaagaaaggcggtctggcaaacgtggtagagaaggcactcggctccattgctaaaagcggtaaaagcgcaattgttgaagtgctgagccccggtcaacgcccgactaaacgcggattaatttacgccgcgacgccagccagcgattttgtctgtggcacgcaacaggtggctagcggtatcacagtgcaagtgtttacgaccggtcgtggtacgccgtacggcctgatggcggtacccgtcattaaaatggcaacccgcaccgagctggcgaaccgctggtttgatttaatggatattaatgcgggcaccatcgctaccggcgaagaaactattgaagaggtgggctggaagttgttccactttattctcgacgtcgccagcgggaagaagaaaaccttcagcgatcaatgggggctgcataaccagctggcggtgtttaacccggcaccggtgacctgatttcttttggaacgtccctcgcaaaacatggccttagtgccatgtttttattgtttaaagcccccacgtccattaataatgcatttgcattaccttagttcaagcttataatttgagcagaaaacaggctgtaaaaggacagtgaatcatgcccgctaatgctcgctctcacgctgtactgaccactgaaagtaaggtcacgatacgcggacaaacaactatccccgcgccagtgcgtgaggccttaaaactgaagccaggccaggacagcattcattacgaaattctgcctggtgggcaagtatttatgtgccgactgggagatgaacaggaggatcatactatgaatgcatttttgcgttttctggatgcagatatccagaacaacccgcaaaaaactcgtccattcaacattcaacaaggaaagaaacttgtcgctggcatggacgtcaacattgatgatgagattggcgacgacgaataatggattttccacaaagggttaatggttgggcgctatatgctcatccctgttttcaggaaacctacgacgctttagttgccgaagtcgagacattaaagggaaaagatcctgaaaattatcagagaaaagccgccacaaagttattggcggtagtccataaagtgattgaggagcatatcacggtcaatccaagtagtccggcattccgtcatggcaagagcttaggctctgggaaaaataaagactggagtcgggtaaaatttggtgctggtcgttatcgtctcttctttcgttatagtgaaaaagagaaagtcatcattctgggatggatgaacgatgaaaacactctgcgcacctacggtaaaaaaacagatgcctataccgtattcagcaaaatgttaaaaagaggacatcctcctgccgactgggaaaccctcacccgagaaacagaagaaacccattgatggtgttcacaatgcccgccgaacgcattcgtgttgaccagcgggcatcctttctcactccccgaccagaatcacttcaaccccagcctttcgcagtccttccaggctatccgcaggaatgccttcatcaacaatgatcatgtcgatacgttgagtatcaatgatcttatgtaaactggaacgattgaacttactggaatcggtgaccacgatgatccgttccgcaacttcgcacatccgacggtttaaacgagcttcatcttcattatgtgtgctgacgccgcgctccagatcgatcgcatctacaccaagaaacagcatatcgaagtggtaattttgcaggctttgctcagcctgatcgccgtaaaaagattggctctgacggcgcaaatgcccgccggtcatcagcagctcaacgccttccgcttccagcaacgcattagccacgttcataccgttggtcatcgcaattacgtcagtgtgcttgcgcatcagacgagcaatctcaaaagtggtggtcccggaatcgaggataacccgatgacctggctgaatcaactcaacggcagctttcgcaacgctgcgtttcatcgcggtgttcagtgcgcttttatcttccacacttggctcgacactcggcgtcgtgctatcgcagatcaacgcgccaccataggcacgcacagcgatcccctgcttttccagaaacgccagatcgttgcggatcgtcacagtagatacgccatacaatgcgctcagatcgttaacctgcacactcccttgctgtcgcagacgctgaatgatctgttctcgtcgctcgctggtgccagtcactcgcttctcaccactagcgtcggtattactcatagtaagtcctttcgtaaaactttcgtttcatttcgttttgcctattaacgcctttctattaagcaaatgcaagcccaccttgcccattgacgcaagctactctcgtttcagtgactttcattatgtttcttttgtgaatcagatcagaaaaccattatctttcgttttatttttatctcaccatgacgcagtatcaactgaaacaaaacgaaagattaatatcgcagtaatctgaactggagaggaaagtgaaacatctgacagaaatggtgagacagcacaaagcgggcaaaacaaatggaatttatgccgtttgttccgcacatccgctggtgctggaagctgcaatccgctacgccagtgcaaaccaaacgccgttactgattgaagcaacctccaatcaggtagaccagttcggcggttataccggaatgacgcccgccgattttcgcggctttgtttgtcagctcgccgacagcttgaatttcccgcaggatgcgttgattctgggtggtgaccatctggggccaaaccgctggcaaaacctgccggccgctcaggcaatggccaatgccgatgatttgattaaaagctacgttgcggcaggattcaaaaaaatccaccttgattgcagcatgtcctgtcaggacgatccgattcccttaactgatgacatcgtggctgaacgcgccgcccgtctggcgaaagtggcggaagaaacctgtcttgaacactttggcgaagccgatctggagtatgtcattggtaccgaagtgccggtacctggcggcgcgcatgaaaccttaagcgagctggcggtcaccacgccggatgccgcccgcgccacgctggaagcccatcgtcacgcctttgaaaagcaaggtttgaatgccatctggccacgcatcattgccctggtggttcaacccggcgtcgaattcgatcacaccaacgttattgattatcagcccgccaaagcgagcgccttaagccagatggtcgaaaactacgaaacgctgattttcgaagcgcactctaccgattatcaaacgccgcaaagcctgcgccagctggtgattgaccactttgccattctgaaagttggcccagcgctgaccttcgccctgcgtgaagctctgttctctctggcggcgattgaagaagaactggtgccagcgaaagcctgttctggtctgcgtcaggtgctggaagacgtgatgctcgaccgcccggaatactggcaaagccactaccacggtgacggcaacgcgcgtcgtctggcgcgtggttatagctacagcgatcgcgtgcgctattactggccggacagccagattgatgacgctttcgctcatctggtacgtaatctggcggatagtccaattccgctgccgctgatcagccagtatctgccgctgcagtacgtgaaagttcgctccggcgagctgcagccaacgccacgggaactcattatcaaccatattcaggacatcctggcgcagtaccacacagcctgtgaaggccaataagcaaaacaaagaggaacacgctatgccaaatattgttttaagccggattgatgaacgcttgattcacggtcaggtcggcgttcaatgggtcggatttgcgggggcaaatctggtgctggtagccaacgatgaggttgccgaagatccggtacaacaaaacctgatggaaatggtactggcagaagggatcgccgtacgtttctggacgctgcaaaaagttatcgacaacattcatcgcgccgccgatcgacagaaaatcctgctggtttgtaaaacacccgccgatttcctgacgctggtgaaaggtggcgttccggtgaatcgcattaacgttggcaatatgcactacgccaatggcaaacaacaaatcgccaaaacggtttctgtggatgcgggcgatatcgcagcatttaacgacctgaaaaccgctggggtggaatgcttcgttcagggcgtcccgacagagcctgctgtggacctctttaaattactttgagggattcatcatggaaatcagcctgttgcaggcatttgcgttgggcattatcgcctttatcgctggcctggatatgtttaacggcctaacccatatgcaccgcccggtggtcctcggcccgttggtcgggctggtacttggcgatctgcataccggaattttaaccggcggtacgctggaactggtgtggatggggctggccccgctggcgggcgcacagccgcctaacgtgattatcggtactatcgtcggcacggcgtttgccattactactggcgtgaaacccgatgtcgcagtaggtgtcgccgtacctttcgctgtcgcagtacagatggggattaccttcctgttcagcgtgatgtccggcgtgatgtctcgctgcgacctggcaacaaacccgcgccgcatttgatgctggtgccgacggcctggtgcattgctataacgggatgacaggtttacatcaccgcgaaccgggaatggttggcgcgggattaacggacaagcgcgcctggctggaactgatagccgatggtcatcatgtgcatccggcggcaatgagcctgtgttgttgctgtgcgaaagagagaatcgtactgatcaccgacgcgatgcaggcagctgggatgccggatggtcgctatacgttatgtggtgaagaagtgcagatgcacggtggcgttgtccgtaccgcgtctggtgggctggcgggcagtacgctgtctgttgatgcggcagtgcgcaatatggtcgagttgacgggcgtaacgcctgcggaagccatccatatggcgagcctgcatccggcgcgaatgctgggtgttgatggtgttctgggaagccttaaaccgggcaaacgcgccagcgtcgttgcgctggatagcgggctacatgtgcaacaaatctggattcagggtcaattagctagcttttgatagtttgctcctttattgggccttcacttcccccgtaaggcctttctttttctttcgttttgatctgtgcagcggtgtcggatgcgacgctaacgcgtcttatccgacctacagttggtgaccgcaaggccggataaagcgtttgcgccgcatccagcaatcccttttgcttcctttatcttttctttcaacgatcacaaatttcgttttatttcttttttctccattgaactttcagtttcttttctatagattttaatcaacgaaagacatcaccaagtgaaatgaaacgaaaggcaagtgaaagcgacaacgcccgacgtcaagttcatcagactaaggattgagttatgccagaaaattacacccctgctgccgccgcaaccggtacatggactgaagaagagatccgccatcagcctcgcgcatggatccgtagtctcaccaacatcgacgcgctacgttccgcgctcaataacttccttgaaccgttactgcgcaaagagaatctgcggatcatcctgaccggagccggaacgagcgcatttatcggtgacatcatcgcgccgtggctcgccagccataccggtaaaaacttcagcgccgtaccgaccaccgatctggtcaccaatccgatggactacctgaacccagctcatccgctgctgttgatctccttcggtcgatccggcaacagcccggaaagcgtcgcagccgtggaactggcaaatcaatttgtaccggaatgctatcacctgccgatcacctgcaacgaagcgggcgctctttaccaaaacgcgatcaacagcgataacgcgtttgccctgctgatgcccgcagaaacgcacgatcgcggctttgcgatgaccagcagcattaccaccatgatggccagctgcctcgcggttttcgcacctgagacgatcaacagccaaaccttccgcgacgtggcggatcgttgccaggcgatcctgaccagtctgggcgatttcagcgaaggtgtgtttggttacgcaccgtggaaacggatcgtttatctcggtagcggtggcttacagggcgcagcacgcgagagcgcgctgaaagtgctggaactgacggcgggtaaactggcggccttttatgattctccaaccggattccgtcatggaccaaaaagcctggtcgatgacgaaacgctggtggtggtatttgtctccagccacccttacacccgtcagtatgatcttgatctgctggctgaacttcgccgtgacaaccaggcaatgcgtgtaatcgccatcgccgcggaaagcagcgacatcgtcgctgccggtccacatatcatcctgccaccgagtcgtcactttatcgacgttgagcaggcattttgcttcctgatgtacgcccagacgtttgcactgatgcagagcctgcacatgggcaatacgccggataccccaagtgccagtggcaccgttaaccgcgtggtgcaaggcgtaatcattcatccgtggcaggcataagaggatcgcattatgagcattatctccactaaatatctgttacaggacgcccaggccaatggctacgcggtgcctgcttttaacattcataacgccgagacgatccaagcgatcctcgaagtgtgcagtgaaatgcgaagcccggtgatcctcgccggaacgccggggacctttaaacacatcgcgctggaagagatctacgccctgtgtagcgcctattccacaacctacaacatgccactggcgctgcatctcgaccaccacgaaagcctggatgatattcgccgtaaagtccacgcaggtgtgcgcagtgcgatgatcgacggcagccacttcccgtttgccgagaacgtgaagctggtgaaaagcgttgttgacttctgccacagtcaagattgcagcgtggaagcagaactgggccgcctgggcggtgttgaagatgacatgagcgttgacgccgaaagtgcattcctgaccgatccacaagaagctaaacgctttgtcgaactgactggcgtcgacagcctggcggtagcgattggtacggcgcacggcttatacagcaaaacgccgaagattgatttccagcggctggcggaaattcgtgaagtggtggatgttcctctggtgctgcatggtgccagcgatgttccggatgaatttgtccgtcgcactattgaacttggcgtcacaaaagtgaacgttgccacagaattaaaaatagccttcgctggcgcggttaaagcctggtttgcggaaaatccgcagggtaacgatcctcgttattatatgcgcgtcggaatggatgcgatgaaagaagttgtcagaaataaaattaatgtctgtggtagtgcgaatcgaattagtgcataatcattagttttttatgatttatcccaatgtacttcccgattaatatcggggagtgccttaatggaaaaggagataactaaaccttaataaatacatcactacaatatcgcaacaataatatatttaaaaaaattatattattcaactttatggtgaggattacacaatgaccagtccaaatattctcttaacccgtattgataaccgtctggttcacggtcaggttggcgtgacctggacatccaccatcggtgcaaatctgctggtagtcgtggatgatgttgtcgctaacgatgatattcaacagaaattaatgggtattaccgcggaaacctacggctttggcattcgtttctttactatcgaaaaaaccattaacgtcatcggcaaagctgcaccacatcagaagatcttcctgatttgccgtacgccacaaacggtacgtaaattggtagaaggtggtattgacctgaaagatgtcaacgtcggcaatatgcatttcagcgaagggaaaaagcaaatcagcagtaaagtttatgtcgatgaccaggatctcacggacttacgttttattaaacaacgtggcgtgaatgttttcattcaggacgtccctggcgatcaaaaagaacaaatccctgactaaatctaaaatcgccttaatattggtttgaggtaataaaaatgcatgaaataaccctacttcagggattatccctggcggcgttagtttttgttctggggattgatttttggctggaagccttatttttattccgcccgataatcgtttgtaccctaactggcgctattctcggtgatattcagactggcttaattaccggtggtctgacagagttggctttcgccggattaacccctgcaggtggtgttcagccgcccaacccgattatggcgggtctgatgaccaccgtcattgcatggtctacgggcgttgatgccaaaacagcaattggtcttggcctgccgtttagtttgttaatgcagtacgtcattctgttcttctattccgctttcagtttatttatgaccaaagccgataaatgcgcgaaagaggcggatacggcagcgttttcccggcttaactggacaacgatgctcatcgtcgctagtgcgtatgcggtgattgctttcctctgtacttacctggcacagggggcgatgcaggcgctggtgaaagcgatgcccgcctggctgacccacggctttgaagtggctggcggtattctgcctgccgttggttttggcttgctgctgcgcgtaatgttcaaagcgcaatatatcccttacctgatcgccggtttcctgtttgtttgctacatccaggtcagcaacctgttgccggttgccgtactgggcgcaggctttgcggtgtatgagtttttcaatgcgaaatcccggcagcaagcgcaaccgcagcccgttgccagtaaaaatgaagaagaggactacagcaatgggatctgaaatcagtaaaaaagatatcacccgtctgggctttcgtagcagcctgctgcaagcgagctttaactacgaaaggatgcaggcgggcggttttacctgggcgatgttgccgatcctgaaaaagatttataaggacgacaaaccgggcttaagcgcggcgatgaaagataacctcgaatttattaatacccacccgaatctggtcggattcctgatggggttattaattagcatggaagaaaaaggagaaaaccgcgacaccattaaaggcctcaaagtggcactgtttggcccaatcgccgggattggcgatgcgattttctggtttactttgttgccgattatggcgggaatttgcagtagttttgccagccagggaaacctgctggggccgattctatttttcgccgtttacctgcttatctttttcctgcgcgtcggctggacccacgtcggttatagtgtcggcgtgaaggcgatcgataaagtgcgagagaacagccagatgattgcccgtagcgcaaccatcctcgggatcacggtaatcggcgggctgatcgctagctatgtgcatattaacgtggtgacaagctttgccatcgacaatacccacagcgttgcgctgcagcaggatttcttcgataaagtcttcccgaacattttaccgatggcctacaccctgctgatgtattacttcctgcgggtgaaaaaagcgcatccggtgctgttaatcggcgtgacttttgtgctctctattgtttgttccgcattcggcattttgtaaatggaacgaggcactgcgtctggtggtgcctctttacttaaggaatttcatcctgtgcaaacccttcagcaagttgaaaactatacggcgttaagtgaacgtgccagcgaatatttattggccgtgatccgtagcaaaccgaatgccgtgatttgcctggcgaccggagccacgccattactgacgtatcattatctggtagaaaaaatccaccagcagcaggttgatgtcagccagctcaccttcgtgaagctcgacgaatgggtggatctgccattaacgatgccaggcacctgcgaaactttcctgcaacagcatatcgtgcagccgctggggctacgtgaagaccagctcatcagctttcgctccgaagagataaatgagacagagtgcgaacgggtaacgaacctgattgcgcgcaaaggcggtctggatttatgcgttctcggattggggaaaaacggtcatcttgggctgaacgaaccgggagaaagcctgcaaccggcctgccatatcagtcaacttgatgccagaacacagcaacatgagatgttaaaaaccgcgggtcgccccgtgactcgtgggatcaccttaggcctgaaggatattctcaatgcccgcgaagttttgttactggtgactggcgaaggaaagcaggatgcgacagatcgttttctcacggctaaagtctctaccgctatcccggctagttttttatggctgcacagtaactttatttgtttaattaacacctaaccagatgaaaaatttgctcaaaatgtttaaattaacttatgtaacagtcacgcattatattaaataacatttgactgggttgaacataacgccgatagcaaaaggagttatgttcaacaatttaattttagatatacatataacttgttctattaataaatcacctcgtattctgactcgccccctggcgcagcaaagtcaggcatttatactcttttgaatacatagaaaattgatatcaatataatgaaaatatcaaatatttgcatataaatataatcttaaagttcagtctatttaatgttcaatgaaatatttctgcctgtataatctttaaagatgttgaacatatattcacattaaatatgattatgtacttgttacaaggataaggttatatatgaataaagttacaaaaacagctattgcgggcttacttgcgcttttcgcaggtaatgccgctgcaaccgatggtgaaatagtttttgatggcgagattttaaaatccgcttgtgaaatcaatgactctgataagaaaattgaagttgctcttggtcactataatgccgaacagtttcgtaatattggcgagcgtagcccaaaaattccattcactattcctttagttaactgcccaatgactgggtgggagcacgataacggcaacgttgaagcgtctttccgtctatggctggaaacgcgagataatggcaccgtccctaacttccctaatctggcaaaagtaggctcttttgctggcatagcggcaacaggtgtgggtatccgtattgacgatgcggaaagcggaaacattatgccactgaatgctatgggcaatgataacacggtttatcagatcccggcggaatccaatggtattgtcaatgttgacctcatcgcttactacgtaagtaccgtagttccaagtgaaatcaccccaggggaagcagacgctatcgttaacgtaacgctggattaccgttaatacgttagggcgttatctgacctgtcagataacgcccttttccttcctctttctcgttgtatcaggttgaaaaataactatgagtaaacgaacattcgcggtgatattaaccttgttgtgtagcttctgtattggccaggcgcttgcaggaggaatcgttttacagcgaacgcgagtgatctatgatgccagccgcaaagaggctgcgttacctgtcgcaaacaaaggcgcagaaacgccttatttactgcaaagttgggtagataatatagatggtaaaagccgtgccccatttattataaccccaccgctatttcgtcttgaggctggcgatgacagtagtctgcgaattattaaaacagctgataacctgcctgaaaataaagagagcctgttctacattaatgttcgtgccattccagcaaagaaaaaaagtgatgatgttaatgctaacgagttgacgctggtatttaaaacacggatcaaaatgttttatcgccccgcacacctgaagggacgggtaaacgatgcgtggaaaagtctggaatttaaacgtagtgaccatagtctcaatatatataacccaactgaatattacgtcgtatttgccggactggcagtcgataaaaccgatctcacaagcaaaattgaatatatcgcgcccggagaacataaacagttaccacttcctgcatctggcggaaagaacgtgaaatgggctgcgatcaatgattatggcggcagttccgggacagaaactcgtccactgcaataaaaaatataaaaacacaggtcatcagggaatgccacaacgacaccaccagggacataaacgcacaccgaaacagttggcgctcatcatcaaacgttgtttgccgatggtgctcactggcagcggcatgctttgcactaccgctaacgccgaagagtattatttcgaccccattatgctggaaaccacaaaaagtggtatgcaaacaaccgatctgagccgttttagtaaaaaatatgcacaactaccaggaacttatcaggttgatatctggctgaataaaaagaaggttagtcagaaaaaaattacatttaccgccaatgcagagcaacttctgcagccacagtttacggtagaacaactacgtgagctgggtattaaggtggatgaaatcccggcgctggctgaaaaagatgacgatagcgtgatcaacagccttgaacaaatcattcccggtacagctgctgaatttgatttcaatcatcagcaacttaatttgagcattccccaaattgcactgtaccgtgatgcaagaggttacgtctccccttctcgttgggacgatggtataccaacgctgtttaccaactacagctttacaggttctgataaccgttaccgccagggcaatcgtagccaacgacagtacctgaatatgcaaaatggtgctaattttggcccctggcgattacgcaactattccacatggacacgcaacgatcagacaagtagctggaataccatcagtagttatttacaacgtgatatcaaggcgttgaagtctcagttgcttctgggagaaagcgccaccagcggcagtattttttccagctacacctttactggcgtgcaactcgcttccgacgataatatgttgccaaacagccagcgcggatttgccccaacggtacgcggtatcgcaaacagtagtgcaatcgtgactatcaggcaaaatggttatgtgatctatcaaagcaacgtgagtgcgggtgcctttgaaattaacgatctctacccctcttccaacagcggcgatttagaagtcacgattgaagaaagtgacggtacacaacgtcgctttatccagccttattctagtttacccatgatgcagcgacctgggcatctaaagtatagcgcgaccgctggacgctatcgcgctgatgcaaacagtgatagcaaggaacccgaatttgctgaagccacggcaatatatggtttgaataatacttttacgctgtatggcggcctgctcggttctgaagattattatgcgctggggatcggtatcggcggcacacttggcgcactgggcgcgttgagcatggatatcaacagagctgacacccaattcgataaccagcactcttttcatggctatcaatggcgtacgcagtacatcaaagatatcccggaaaccaacaccaatatcgctgtcagctactatcgctataccaacgatggctattttagttttaatgaagccaatacccgcaattgggactataacagtcgccaaaaaagtgaaattcaattcaacatcagccagacaatatttgatggggtaagtctgtatgcctccggtagccagcaagactattggggcaataacgataaaaacaggaatatctctgttggggtttccggccagcaatggggagttggttacagcctgaattatcaatacagccgctacactgatcaaaataatgaccgcgcactctctttgaatctcagtattccgttagaacgctggttaccgcgtagccgggtttcctatcagatgaccagccagaaagatcgcccaacccaacatgaaatgcgtcttgatggcagtctgctggatgatggtcgcctgagctatagcctggaacaaagtctggatgacgataacaaccataacagtagcctgaacgccagttaccgtagtccttatggcaccttcagtgccggatacagctacggtaatgacagcagccaatacaattacggcgttaccggcggcgtggttatccatcctcatggcgtgacgctcagccaatatctgggcaacgcttttgcgcttatcgatgctaacggagcatctggcgtgaggatacaaaactatccggggattgctaccgatccttttggctatgcagtggttccttatctcacaacttatcaggaaaaccgtctcagcgtagatactacgcagctgcccgataacgtcgatcttgaacaaacaacacagtttgtggtgcccaacagaggtgcaatggtagcggcgcgtttcaacgccaatatcggttatcgcgtacttgttacagtcagcgatcgcaacggtaaaccgttgccctttggcgctcttgccagcaacgatgatacggggcaacaaagtatcgtcgatgagggcggcatactatatctctctgggataagcagtaaaagtcaaagctggactgtacgctggggaaatcaggcagatcaacaatgtcagtttgctttcagtacaccggatagtgaacctacaacctctgtattacaaggcacagcgcagtgccattaaggataaaaaaatgaaaagagcgcctcttataacaggtcttttgttgatatccacatcctgcgcttatgcctccagtggagggtgtggagccgacagcactagcggtgcgacaaattacagcagtgtggttgatgatgttacggtgaaccagacagataacgtgacaggacgggagtttacctctgcaacgctaagtagcactaactggcaatacgcctgttcctgctctgcgggtaaggcagttaaacttgtctatatggtcagccccgtacttaccaccactggacatcagacaggatattacaaactcaatgacagcctggatattaaaaccacattacaggcaaacgacattccaggactcacaaccgaccaggttgtctctgttaacacccgattcacacagataaaaaacaacacggtatattctgctgcaacccaaacgggtgtttgccagggtgatacgtctcgttatggacccgttaatattggtgcgaacaccacctttaccctgtatgtcaccaagccatttctcggcagcatgaccattccgaaaacggatattgccgtcattaaaggcgcgtgggtcgatggaatgggaagcccgtctacaggtgacttccatgatttagtcaagttaagcattcagggaaatctcaccgccccacagagctgcaaaattaatcagggcgatgttattaaggttaattttggattcatcaatggtcagaagtttaccacccgcaatgccatgccagacggttttactccagtagactttgatatcacttatgactgtggtgatactagtaagattaaaaacagcttgcaaatgcgcatcgacggtacaactggggtagtagaccagtacaacctggtcgccaggcgaagaagtagtgacaatgtgcccgatgtcggtattcgtattgaaaatctcggcggcggagttgcaaatattccttttcagaacggtatccttcccgttaatccttccgggcatggcaccgtcaatatgcgcgcctggccagttaatctggtcggtggtgagctggaaacaggaaaatttcagggcacagccaccattaccgtcatcgtgcggtaaaagaagacgttgcgttttgattaacgcaacgcttcggcactgttacccctgctgctccagcgcatacttatacagcgcatttttcttcacgccgtgaatttctgcggccagcgccgccgcttttttcagcggcagttctgcctgtagcagcgccagcgtgcgcagggcatcggcgggtaagtcttcttcctgtgctttatgaccttcgacaatcagcaccatttcgcctttgcgacggttttcatcttcctttacccacgccagcagctcgccaacgggcgcgccgtgaatggtttcccaggttttggtcagctcacgcgccagaaccacgtagcgggattcgcctaataccgcaacgatatcttccaggctatctaacagacggtgggtagattcataaaaaatcagcgtgcgcggctccgcttcaatggcttttagcgcatcacggcggcctttacttttggcaggtaaaaagccttcgtaacagaaacggtcagagggtaaacccgctgcgcttaacgcagtgatagcagcacacggcccgggtagcggcaccacgcggatccccgcttcacggcaggtacgcaccagatggtagccaggatcgttaattagcggcgttccggcatcggaaaccagcgcaatgttttgcccctcttgcagcttcgccagcagcgtttcagctttttgttgttcgttatggtcgtgcagcgcaaacaaccgggcattaatcccaaaatgttgcagcaataaaccggtgtgacgagtatcctcggcggcaatcagatcaacggcctgtaatacctctaacgcacgctgggtgatatccgccagattgccgattggcgtcggtacaatgtaaagctggccctgagaattatccgcgctttggtgttgtttcattgtgtcgtccgtattgccgatttaatattgagcattgcgtaaaaaaaatatcactggatacattatggtacccagtacattttctcgtttgaaagccgcgcgttgtctgcctgttgttctggcagccctgattttcgccggttgtggcacccatactcccgatcagtccactgcttatatgcagggcacggcgcaggctgattctgccttttatcttcagcagatgcagcaaagctctgatgataccaggatcaactggcaattactcgccattcgtgcactggtgaaagaaggtaaaaccgggcaggcggttgagttgtttaaccaactaccgcaagaactgaacgatgctcagcgtcgcgagaaaacactgctggcggtagagattaaactggcgcagaaagattttgctggcgcgcaaaacttgctggcgaaaatcacacctgccgatttagaacaaaaccagcaagcgcgttactggcaggcaaaaatcgatgccagccaggggcgtccttccattgatttactgcgcgcgttaattgctcaggaaccgctgcttggcgcgaaagaaaaacagcagaatattgatgccacctggcaggcgctctcctccatgactcaggaacaggcgaatacgctggtgatcaacgccgacgaaaatattctgcaaggctggctggatctgcagcgcgtctggtttgataaccgtaacgatcccgacatgatgaaagccgggatcgccgactggcagaaacgttatccgaacaatccgggcgcgaaaatgctgccaacgcagttggttaacgtaaaagcgtttaaaccagccagcaccaacaaaatcgccctgctgttgccactgaatggccaggcagcggtatttggtcgcactattcagcaaggctttgaagcggcgaaaaatatcggcactcagccagtggcagctcaggtagctgccgcacctgccgcagacgtagctgaacaacctcagccgcaaaccgtggatggcgttgccagcccggcacaagccagcgttagcgatctgaccggtgaacagcctgcagcccagccggtgcctgtaagcgccccggcgacaagcaccgcagcggtaagcgcacccgcaaatccatccgcagagctgaaaatctacgataccagtagtcaaccacttagccagatcttaagccaggttcagcaggatggcgcgagtattgtggtcggtccgttgctgaaaaataacgttgaagagttgctgaagagcaacactccgctgaacgtactggcactgaaccagccggagaatatcgaaaatcgcgtcaatatttgttacttcgcgcttagtccggaagacgaagcgcgcgatgcagcgcgtcatattcgtgaccagggtaaacaagcgccgctggtgctgatcccacgcagtagtttgggcgatcgcgtagccaatgcgtttgcgcaagagtggcagaaactgggcggcggcaccgttctgcaacaaaaatttggttccaccagcgaattacgcgcgggtgttaacggcggttctggtattgctttaacgggtagcccgattactctcagagcgacaaccgactccggcatgacgaccaacaatccaacgctgcaaaccacgccaaccgatgaccagttcaccaataatggcggtcgtgtcgatgcggtgtacattgtggcaacgccgggtgaaatcgcttttatcaaaccgatgatcgccatgcgtaacggtagccagagcggtgcaacgctgtacgccagctcccgcagtgcgcaagggaccgctggcccggatttccgactggagatggaaggcttgcagtacagcgaaatcccgatgctggcaggcggtaatctaccgttaatgcagcaggcactcagcgcggtgaataacgattatagtctggctcgcatgtatgcgatgggcgtcgatgcctggagcctggcaaatcatttcagtcaaatgcgccaggttcagggttttgaaatcaacggtaataccggaagcctgacggctaacccggattgcgtgattaacaggaacttaagttggctacagtaccaacaaggtcaggtagtccccgtcagttaaattaagtgattaacaggaacttatcatggctacagtaccaacaaggagtggtagtccccgtcagttaaccaccaaacagaccggcgatgcgtgggaagcacaagcgcgtcgctggctggaaggcaaaggactgcggtttatcgccgctaacgtgaacgagcgtggcggcgagatcgatctgataatgcgtgaaggccggaccaccatttttgtcgaggtacgctatcgccgctctgcgctttatggcggcgcggcagccagtgtgacccgcagcaaacaacacaaattattacagactgcccgcttgtggctcgcgcgtcataatgggagttttgatactgtggattgccggttcgatgtggtagccttcaccgggaatgaggttgagtggattaaggatgcctttaatgaccacagttaattaaggtttaaggattagcgtgcaagaaagaattaaagcttgcttcactgaaagcattcaaactcaaattgcggcggcagaggcgcttccggatgccatctcccgtgcagccatgacgctggttcagtctctgctcaatggcaacaaaatcctctgttgtggtaatggaacttccgctgccaatgcacagcattttgctgccagcatgatcaaccgtttcgaaacggagcggcccagcttacctgccattgcactaaatactgataatgttgtcttaacggcgattgccaacgatcgcttacatgatgaagtgtatgcaaaacaggtgcgggcgctgggtcatgcgggagatgtattgttagccatttccacccgtggcaacagccgcgatattgttaaagcagttgaagccgccgttacgcgtgatatgaccattgtggcattgaccggctatgacggcggcgaacttgcaggtttgttagggccacaggatgtggagatccgcattcctagccatcgtagtgctcgcattcaggaaatgcatatgctgacggtaaattgcctgtgcgatctgatcgataacacgcttttccctcaccaggatgattaaggagaatacatgaaggcattaagcccaatcgcagtccttatttccgcgctgctgttgcaaggttgtgttgccgctgccgtagtgggtaccgctgctgtgggtaccaaagccgcaactgacccacgcagtgtcggcacccaggtggacgatggtaccctggaagtgcgcgtgaacagcgcattgagcaaagacgaacagattaagaaagaagcgcgcattaatgtaacggcctatcagggcaaagtgctgctggttgggcagagtccaaatgctgaacttagcgctcgcgccaaacagattgctatgggcgtagacggtgccaacgaagtgtataacgagattcgtcagggccagccgattggtctgggcgaagcatctaacgatacgtggatcaccaccaaagtgcgtagccagctcttaaccagcgacctggtgaaaagctccaacgtgaaagtgaccaccgaaaacggtgaagtgttcctgatggggctggtgactgaacgtgaagcgaaagcggcggcagatattgccagccgggtgagcggcgtgaagcgggtaactacggcgtttacgtttattaaataacagccccttgtaatgcctgatgcgacgcttgccgcgtcttatcaggcctacaacgatacaaaccgtaggtcagataaggcgtttacgccgcatccgacatgttttccctcaaatcagaacaacagcgccagcccgccgacaatcacaccagacactgccaccatcgcccctgtcagccataaggctttcgccgggaacgctttgcgcagcataatcagactcggcaaactcactgccgggagcgtcatcaacaatgccagcgccggagcggttcccatacctgccagcatcatcgtttgtacaatcggaatttctgctgccgtgggaatgacaaacaagcatcctgctaccgccatcgccaccacccacatcaggctgttatcgacagcaccatcggcatgggggaataaccagacgcgagcggcacccaacaccagtactgcaaggatgtaaaccgggatcgtactccagaaaagcgtccatagcgccctgccccagcggctaaaaaacccgccctgtgcttccggtatgtcaatttcgaccggtgcctgcgtttgcggtgtttcacgcacccatttttgcaccagcgtcgcaatcagcaacaccatcaccagcccggccaccagacgaatcgccgcaaaaccccagccgaggacaaagcccataaacaccagcgtcgccgggtttaacaccggattgcccatccagaatgccagcgcaccgcccatgctcacctgttggcgacgcattcccgccgcgaccggagccgcacagcaggtacacatcatgcccggcaagctaaacagcgttcccagcagcgtgccgcgaaagcggctttgcccaagcgtacgcaacaaccagtcacgcgggatcagcacctgaatcaagctaccgaggatcacccccagcaccgccgctttccataccgcgaggaaatagatcatcgcgtaatccaacgccgcctgccatgggttagcatccgcctgcgcaaggatagatttaccgatactgtgggtttcggcagcagtaaacgctttgccgtagtaaggttcccatttcacataccagagaccggcaatgacaacgagaaagaaaagcgcgggtttccaccactgaatgggcgttgccgcctgagaactagactgaccagtcatagcattccccaggaataagttatgataattgagcgcgtgaatattacgctcactatcaattcttgggaataattattcagctcttttgcgtaattcactagagcttaaaatcgtcacgccttcatgctcaggccgcatgctctctgccagcatgacccgcgccacgtctctcgcatcaatggatttccagttacctggtaacaaacggaacagcggcgcaaaaagcgtttcgttcatccgctgtttgctacgatcgcccagtaacatgctcgggcgagcaatggtcaatttcggccagttctgggcgattaatgcttcttccatctcccctttgacgcggttatagaaaaacgggctgtgggcattggcacccatcgcactgactaccaacatatgctgcgcgcccagtcgccgcccggttaatgcggtatccactaccagcgtgtaatcggcatgaataaacgcctctttgctccccgcttctcgccgcgtggtgccgagacaacaaaacacaatgtcgatgggatcggtgacctgcgccaacgcgtcactcagttgcggatcatggggattaaacaccccgggcatatcgcccaacggacgtcgcgtcggcgcagcaatggcgttaactttcggttcgttaatcaacatccgcagcaggtgaccgcccaccagccccgttgcgcctgtaatcagtacctgactcatcttcgctcctttacagaattgtctgccttgcgctccacggctcatgcaccaggcttaatagaccatgaggtaattatccccgattgtgggaaattcgcctcatccaatgcaacaacgcggaggaagcatgagtaagaaaattgccgttttaatcactgatgaatttgaggatagtgaatttactagtcccgcagacgagttccgtaaagccggacacgaagtgattaccattgaaaaacaagcgggtaaaacggtgaaaggcaaaaaaggagaagccagcgtgaccatcgataaatccatcgatgaagtgacgcctgcggagtttgatgccctgctgctaccgggcggccatagtccggattatctgcgtggggacaaccgttttgtcacctttacccgtgattttgtgaatagtggcaaaccggtgtttgccatctgtcacggcccgcagttgctgatcagcgccgatgtgattcgggggcgcaaactgaccgcagttaaaccgatcattattgatgttaaaaatgcgggcgcggaattttacgatcaggaagtcgtggttgataaagatcagctggttaccagccggacaccggacgatctgccagcgtttaaccgcgaggcgttacgcctgctcggtgcctgattacgcctgctcggtgccactgtcgcgtagccaaatcatttttttaccaaagcccagcgtgttgtcggtgaatttgatttcatcgagccggatttcccacaccggggcgctcagcattctggcaaccggaaagcgacgattgtacgccttgcgcgcgaggtcgctttcctcaccttccagcctgcggatctcacctttaaactgcacaccgcgaattaacgctaccgttttcggctgaccgtttaccgttccggcaaccgcagcctgcggcccactcatctgcgcgtggcgcgttttttcttccgtcaaaatgtagaaggcgactttctgcgcatcaaaaagataaaaggcattagcgcaccagagttccccttcctgctgcacacaccaagtgacaacatgttgttttgccagccaacggctgatggcgatgagtgtttccattgctgttctcttttatactgtgggcctgaccttaacatgcgacgcagacgatgacaccctggtttctttacttgatccgtaccgccgacaataagctttataccgggatcaccacggatgtcgaacgccgctatcagcagcaccaaagcggcaaaggggcgaaagcactgcgcgggaaaggagaactaacgctggtgttttccgcgccagtgggcgatcgtagcctggcgttacgggcggaatatcgcgttaagcaactgaccaaacggcaaaaagagcgtctggtagcggaaggcgcagggtttgcagagctgttaagcagtctgcaaaccccggagattaaaagcgattgaaatgctcgtgatactcaaccaggccggtaacgccattcagcgcgtcatccgctaaacgatgtacctggaaggcgctttcagtgcccggccagcggcaacgcagatcgtgatgcgccgccagttcaaagccgaaacgactgtacagcgccggatcgcccagcgtcaccactgcggcatagccgaactcattaaggctatcgagtccttcatagaccagttggcgtgccagcccctgtccacggtatttttcatcaaccgccaacggtgccatgccgacccattgcaggtcttcgccctgcacatcaaccggactaaatgccacatagccaatgacctgaccttcgtcatctgtcgccaccagccccagcgtcagaaagccatcttcacgcagatcgtgaaccagcttcgcttccgcatcactttcgaaactgcgacgcagcagggcatcaatacccggcgcatcaatgggaatttctactcgaattagcatggttcacctacgcttgtctgtttggtttcaggcgcggttttcattcccgcctcaacaaaatccgccagttgcagcagcatcatgcgtaaggctttcggcatttgctccagttcaatggcgtccatcaggtttttcacatacagccccagctccgtatcgccttcaatcaccagccgacgctggaagaagagcgtatccggatcttgtttacgcgccgcaatcatcagcagatcgctggcgtcggcactaaaactcacatcagcttgcgcgttctggctaacgaccagtttgccattcaccacgctggtaaaccattgcaggtcaatatcacgcacatgaatacttaaccagcggccttcaagaaactccagctcgccatcatccagcgcctggcggaattgccagcttaagacctgctcaagaacctggcgttttagcgcaaatggcgtcagttttaccggtacactcaacagagatggccccaaatgcacaatacgggaacgcagtttatccaacacgagttttactccctgtttcaacaatcatcctattttgccatatcagaaaaataacatagcggtataaatcaacaattccatatgaaattgctgctaccaccaatacaactttaactgccttaaatcaaaaattgtcgcagcaaggttaactaaaatcccagttcgttaacatttttgcgttttgatagcgcaaccttcaggaaaaattatggagctgctctgccctgccggaaatctcccggcgcttaaggcggccatcgaaaacggcgcagatgctgtttatatcgggctaaaagatgataccaatgcccgtcacttcgccggccttaactttaccgagaaaaaattgcaggaagcggtgagttttgtccatcaacatcgccgcaaacttcacatcgcgattaacacttttgcgcatccggacggttacgcccgttggcagcgcgccgtggatatggcggcgcagctgggtgccgacgcgctgatcctcgccgacctcgccatgctggagtacgccgccgagcgttatccgcatattgagcgccacgtaagcgtgcaggctagcgcgaccaatgaagaggcgattaacttttatcatcgccattttgacgttgctcgcgtggtgctgccgcgcgtgttgagcattcatcaggtgaaacaactggcacgggtcacacctgtaccactggaagtctttgctttcggcagcctgtgcattatgagcgaaggtcgttgctatctgagcagctatctgacgggtgagagccccaacaccataggcgcgtgttctccggcccgtttcgtgcgctggcaacaaacgccgcaggggctggaatcccgcctgaacgaagtgctgatcgaccgttatcaggacggcgaaaacgcaggttatccgacgctatgtaaagggcgttatctggtggacggcgagcgctatcacgcgctggaagaaccaaccagtctcaataccctggaactgctgccggagttaatggcggcgaatattgctagcgtgaaaattgaaggccgccagcgtagcccggcgtatgtcagccaggtggcgaaagtctggcgtcaggctatcgaccgttgtaaggccgatccgcaaaactttgtaccgcaaagcgcgtggatggagacgctcgggagcatgtccgaaggcacgcaaaccactcttggcgcatatcaccgtaaatggcagtgagaaaagcaatgaaatattccttagggccagtgctgtggtactggccaaaagagacgctggaagaattttatcagcaggccgccaccagcagcgccgacgtgatttatcttggtgaagcggtatgcagcaagcgtcgggcaaccaaagttggcgactggctggagatggcaaaaagcctcgccgggagtggtaagcagattgtgctctccacgctggcgctggtgcaggcaagttctgaactgggcgaactgaaacgctatgttgagaacggtgagtttctgattgaagccagcgatctcggcgtggtgaatatgtgcgctgaacgcaaactgccgttcgtcgccgggcacgcgctgaactgctacaacgcggtgacactgaaaatattgctcaaacagggcatgatgcgctggtgtatgccagtggagctttcccgcgactggctggtgaatctgcttaatcagtgcgatgagctgggcattcgtaaccagtttgaagtggaagtcctgagctacggtcatctgccgctggcctactccgcccgctgctttaccgcgcgtagcgaagaccgcccgaaagatgagtgtgaaacctgctgcattaagtatccgaacgggcgcaacgtgctgagccaggaaaaccaacaagtgtttgtactcaatggcattcagaccatgagcggctacgtttacaacctcggtaacgagctggcatccatgcagggcctggttgatgtggtccgcctgagtccgcagggtactgacactttcgcgatgctcgacgccttccgcgctaatgaaaatggcgctgcaccactgccgttgacggcgaacagcgactgtaacggctactggcggcggctggcaggactggagctgcaagcctaagtaaatagctcactttgttaacaactttaactactctttaatgcagtattaaagattaatcggtaacaaagtgagctgttatgactgataaaaccattgcgtttagcctactcgatctggcccccattcccgaaggttctagtgcgcgagaagcattctcccactctctcgatctcgcccgtctggctgaaaagcgcggctatcatcgctactggctggcagaacaccacaatatgactggcattgccagtgctgccacgagcgtattgatcggctatctggcggcgaataccaccacgctgcatctggggtctggcggcgtgatgttgcctaaccacagtccgttggtcattgcagaacagttcggcacgcttaatacactctatccggggcgaatcgatttggggctgggtcgtgctccgggtagtgaccaacggacaatgatggcgctacgtcgtcatatgagcggcgatattgataatttcctccgcgatgtggcggagctggtggactggtttgacgcccgcgatcccaatccgcatgtgcgcccggtaccaggctatggcgagaaaatccccgtgtggttgttaggctccagcctttacagcgcgcaactggcggcgcagcttggtctgccgtttgcgtttgccagtcacttcgcgccggatatgctgttccaggcgctgcatctttatcgcagcaacttcaaaccgagtgcacggctggaaaaaccatacgcgatggtgtgcatcaatattatcgccgccgacagcaaccgcgacgctgaatttctgtttaccagtatgcagcaagcctttgtgaagctgcgccgtggcgaaaccgggcaactgccgccgccgattcaaaatatggatcagttctggagtccgtctgagcagtatggcgtgcagcaggcgctgagtatgagcttggtaggtgataaagcgaaagtgcgtcatggcttgcagagcatcctgcgcgaaaccgacgccgatgagattatggtcaacgggcagattttcgaccaccaggcgcggctgcatagctttgagctggcgatggatgttaaggaagagttgttgggataatgtgtcttaacgcgggaagccttatccgagctggcaacgctgtcctacatagacctgataagcgaagcgcatcaggcattgtgtaggcagcagaaatgtcggataaggcaccgctgattactgatacaccggcagtaaattaaagctgcttaaaatatgcaccagtgcgttgccgacgccaaacaccagaatcagcgcaatcatcggcttgccaccccagacgcggaatttcgggctgccaaagcgtttacggcttgcacgggctaacagcgccggaacaattgccgcccagatggtagccgctaaaccagcataaccaatggcgtacaggaatccgttcgggaacaacagcccccccacaactggcggggcaaaggtcagcaatgccgttttcaagcggcccacagcgctgtcgtcgaaaccaaacagatctgccagatagtcaaacaaacccagcgttacgccgaggaagctactcgctaccgcaaagttactgaacacgaccagcagcagatccagactacggctgttcagtacgccgcttaacgcctgtaccagcacatcaatattaccgcccttctctgcaataccgataaactccggacgcgggatgttacccatcgtcgccagcaaccagatggtatacagcgccagcgccatcagcgtaccgtacaccagatatttcacgatggttttcggatctttgccgtaatacttcatcaggcttggcacgttaccgtgataaccaaagcttgccagacagaacggcagggtcatcaacagatacggtgcataagacgcattgctttcggcgacgttgaacaatgtcgcaggctgcacatgccccagcaggctaccaaaggtgaggaagaaggtaatgactttcgcccccagcacaatcgctgtcatgcgactgacggctttagtgctcaaccacaccacaaacgctaccagcaatgcaaaaccaaaacccgccgcccgtgccgggacgtttagactcatctctgcgaaggtgtgatgcagaatgctaccactggcagaaatataggcataggtcaggatatagagcacaaaggcaatggaaatgccgttgaccacgttccagcctttgcccagcaaatctttggtgatggtgtcaaaactgctaccgattctgtaattcaggttagcttccagaatcatcaagccggaatgcagcatacagaaccaggtaaagatcagcgccgccatactccagaaaaaccacgccccggacatgaccactggcagagaaaacatccctgcgccaataatggtgccgccgataatcaccacgccgccaagcaggctcggactcgtttgggtggtggttagtgttgccatgagggcttctctccagtgaaaaatagtgcgactgcgttgttatgcattgcactgtaccagtacacgagtacaaaagacagaaaaaaagccccgatggtaaaaatcggggctgtatatattattttacagattgtgttcgctgttcagcgatgattacgcatcaccaccgaaacgacgacgaccggtagaatcatcacgacgcggagcgcggccttcacgacgttcgccgctaaaacgacgaccatcaccacggccaccttcacggcgttcaccgctgaagttacgaccgccttcacgacgttcgccaccgaaaccacgaccaccgccacgacgctcaccgccagtatgcggctgtgcatcgcccagtaactgcatgttcatcggcttgttgagaatgcgagtgcgcgtaaagtgttgcagcacttcacccggcatacctttcggcagttcgatggtggagtgagaagcaaacagcttgatgttaccaatgtaacggctgctgatgtcgccttcgttagcaatcgcaccaacgatatgacgaacttcaacaccatcatcgcggcccacttcaatgcggtacagctgcatatcgccaacatcacgacgttcacgacgcggacgatcttcacggtcaccacgcgggccacggtcgttacgatcgcgcggaccacggtcatcacggtcacggaattcacgtttcggacgcatcggcgcatctggcggtacgatcagagtacgttcaccctgtgccattttcagcagtgccgcagccagagtttcgagatccagctcttcaccttcagcagtcggctgaattttgctcagcagtgcgcggtattgatccagatcgctgctttccagctgctgctgtactttagcggcgaatttttccagacggcgtttgcctagcagttctgcgttcggcagttctacttccggaatagtcagcttcatagtacgttcaatgttgcgcagcagacgacgctcgcggttctcaacgaacagcagcgcgcggccagcacgacccgcacgaccggtacgaccgatacggtgaacgtaagactcagaatccatcgggatatcgtagttaactaccaggctgatacgctcaacgtccaggccacgggctgcaacgtcggtcgcaatcaggatgtccagacgaccatctttcaggcgttccagtgtctgttcacgcagcgcctggttcatgtcaccgttcagcgcggcgctgttgtagccgttacgctcaagagcttcagccacttccagagtcgcgtttttggtacgaacgaagataatcgccgcatcaaaatcttccgcttccaggaaacgtaccagtgcttcgtttttgcgcataccccagacagtccagtagctctggctgatgtcaggacgggtagtcacgctggactgaatgcgcacttcctgcggctctttcataaagcggcgggtaatgcgacgaatcgcttccggcatggttgcagagaacagagcggtctgatgaccttccgggatctgcgccataatggtttcaacgtcttcgatgaagcccatgcgcagcatttcgtcagcttcatccagaaccagaccgctcagtttagagaggtccagagtgccacgtttcaggtggtccagcagacggcccggagtaccgacaacgatctgcggcccctgacgcagggcgcgtaattgcacgtcataacgctggccgccgtacagagcaaccacatttacgccgcgcatgtgtttagagaaatccgtcattgcttcagcaacctgtaccgccagttcgcgggtcggtgccagcaccagaatctgtggtgctttcagctcaggatcaagattctgcaacagaggtaaagagaatgctgcagtttttccgctccccgtctgggccatacccagaacgtcgcggccattcagcagatgtggaatacactctgcctgaattggagatggtttttcgtaacccagatcgttaagggcttcaaggataggagccttcaggcccagatctgcaaaagtggtttcgaattcagccatgtagtacgtgtgcctcaaaattaatggcggccagtctacataactcatcatgaaattgatcagcaattttcattgaaaagtgtgaaccggctcaaagtaggtgtattaacgaacaacaacgccctcacccgttaaggtgatggcaatcaaaaaagattacgggctgatgtgtacgtcagttattgctggtcgctttctgccaggtcatcttggtcctggcccaggaggcttaattccaacaatgcgtatcggtgctcaacaaagttatgaacgttgttggcaaccgccagtttgaacagtgccgtggcgctgtccaaatcccccagacttaggtagtacttacctaaatagaagttggtttcactgagatgctcagcgaggctggtgttatccgttgcgtccgccttgagcctttccattaacgtttgttcgctaatgttgcccaggtagaactcgacaatgttccatccccactgttccttatcgcttttttcgaagtgctgtttcaacacttctttagcctgcttctcatcgagcttctgctcggcgagataaagccacagactacggaaaggatcattgggatcgtcttgataaaacgccagcagatcatcttgcgctaacttgtcacgaccgccgtaatataatgcgatcccgcgattcaagtgcgcgtagttgtaagttggatcaagctcaagtacagaatcaaacgcttcataggcagcatcaaaattgcctgcctgcgttaaatatatgcctaagtaattgaatacttcaggcatatccggtcggattgccagcgcttggctaaaatcgttacgcgctaatgccctcagaccgagactatcatacaacactccgcgctcatataaaagctgtgcgcgttcgtcatcggttaaagcccgactggcaaggatttgttccatacgtgccagaatcacttcctgctgtaaagtcggttgcaatggtaccgcgaggacttcacttttacgccaggaagtattactgcatcctgcaagcgtaagtgctgtcgcaacgaaacaccagcgcaaaaaaggcttcatttcccactcccgaagaccacggttgaatgaacgtcctgttcccggttgctaacaaggcgtcctgcccggttaaaagccccccgccgcagcggagggcaaatggcaaccttactcgccctgttcagcagccggagcttccggtgctgcagcaggttgagactgctcagtcgcttctttaatgctcagacggatacggccctggcgatcaacttccagaactttcaccggtacttcctgacccatctgcaggtaatcggtcactttctcaacgcgtttgtcagcgatttgagagatgtggaccagaccttctttaccgccgccgatggcaacaaatgcgccaaagtcaacgatacgggtcactttaccagtgtagacgcggcccacttcgatttctgcagtgatctcttcgatacgacgaatagcatgtttcgctttctcgccgtcggtcgctgcaatcttcacagtaccgtcatcttcgatttcgatggtggtgccagtttcttcggtcagagcacggattacagaaccgcctttaccgataacatctttgatcttgtccgggttgatcttgatggtatggatacgcggtgcgaactcagagatatcgccacgcggcgcgttgatcgcctgttccattacgcccaggatatgcagacgcgcacctttagcctggttcagcgcaacctgcatgatctctttggtgataccttcaattttgatatccatctgcagtgcagagataccgtcgcgggaacctgcaactttgaagtccatatcgcccaggtgatcttcgtcgcccaaaatgtcagacagtacaacgtagttgtcgccttctttcaccagacccattgcgatacccgcaacggcagctttgatcggcacacctgcgtccatcagcgccagagacgcgccgcacacggaagccatagaagaggaaccgttggattcagtgatttcagacacaacacgtacggtgtacgggaatttgtccatatccggcatgactgccagcacgccgcgcttcgccagacgaccgtgaccaatttcacgacgcttcggagaaccgaccatgccggtttcgcctacggagtacggagggaagttgtagtggaacaggaaggtatcggtacgttcgcccatcagttcatcaagaacctgcgcgtcacgagcagtacccagcgttgcggtaaccagcgcctgcgtttcaccacgggtgaacagcgcagaaccgtgagtacgcggcagcacgccagtacgcacatccagaccacggatcatatctttttcacgaccgtcgatacgcggttcgcctgccagtacgcggctacgaacaacgtttttctcgatcgcgtgcagaatttcacccagttcgttttcgtccagggtttcgtcttcagcaagcagcgtcgcgatggtttcagatttgatgacatcaacctgcgcataacgctcttgtttgtcggtgatgcggtaagcatcgctcaggcgagcttcagccagtgcagcaacgcgcgcgtttagcgcttcgtttaccggctccggctgccagtcccaacgcggtttaccggcttctttcaccagttcattgatgttctgaataacaacctgctgttgttcatgaccgaacactactgcgcccagcatctggtcttcgctcagcagttgagcttcagattcaaccatcagtacagcggcttcagtaccggcaacaaccagatccagtttgctctctttcagctcgtcctgagtcgggttcagtacgtactggtcattgatgtaacctacgcgggcagcaccaatcgggccattgaacggaataccagacagagacagcgctgcggaagcaccaatcatcgcgacgatatccgggttaacttgcgggttaacagaaaccacggtggcgataacctgaacttcgttgacgaagccttccgggaacagcgggcgaatcgggcggtcaatcagacgcgcgatcagggtttcgccttcgcttgggcggccttcacgacggaagaagctacccgggatacgaccagcagcgtaggtacgctcctgatagttaacggtcagtgggaagaagtcctgacctggtttggcttttttctggccaacaacggtaacgaataccgcggtgtcatccatgctaaccataacagcggcagtagcctgacgagccatcatgccggtttccagagtcacggtgtgttggccgtactggaatttacgaacgatcggattaagcaatgtaatatcctttctctttcttagacagtaccttacggcactggtgttaataccgcttcttctgcgcatcctcgcgactaatgacaaccctaacccagctctatgtgggtaaagcctctcattagccgcgcgaacctctgcaacggaagatcattcatagcaacaatacattagtttccagtgaattgctgccgtcagcttgaaaaaaggggccactcaggcccccttttctgaaactcgcaagaattagcgacgcagacccaggcgctcgatgagctgggtgtaacgtgctacgtctttacgtttcaggtagtcgagcagtttacgacgctgagaaaccatgcgcagcagaccacgacggctgtggtgatcttttttgtgctctgcaaagtggccctgcaggtggttgatctgtgcagtcagcagtgctacctgaacttcggtagaaccggtgtcgtttgcgtcacgaccaaactcagaaacgattttagctgttgcttcagtacttagagacattttaaaactccaaagtatatagaatgaaaggacgccgatctctaattcagcgatcccagtgtacgttacgcaaagtgttaaacaatttacgcgacgttaagcggcagtattctactcgtagcgacctgttatcgcaagacggttaacattacgccgggtattcaaccaccaggcgacgaggcgcaacgcggccttcatcgtcaatttcgcccataccgataaatttgccgttctcaccttccgtgacgcgaaccagtccttccagtggcgcaccagatgtacgaaccgggttaccatttttgaagtaaacagaagacgttaacggaagattcaccaccggatagtcgctagctggactgtccattggcatcagtaatggatcaagtaactccgcggctggaatatcctgctgttcagcttgctcaacaagttcacgcaggtgctccagggtcaccatccgttcaaccggatatttacttaccgccagacggcgcaggtaaataacatgcgcgccacagccgagtttttcacccaggtcatcaatgatggtgcggatataagtgcctttactgcagtgaatttccagctccagctcattgccttcatggcgaataaacagcaattcataaacggtaatcggacgcgcttcacgcggaacttcaatgccctgacgcgcatattcgtacagttttttgccctgatatttcagtgcactatacatgctagggatctgttcgatatcgccacggaaagtatccagtgccgctgccagctgctctgcgctaaaggttaccggacgttcttcaacgatctgtccgtcggcatcagaagtatcggtacgctgtccaagacgcgcaatgacccgatagcgtttgtcggagtccagcagatactgggaaaacttcgtcgcttccccgaggcaaatcggcaacatgccggtcgccagcgggtccagcgcaccggtatgcccggcacggttggcgttatatatacgtttcactttttgcagcgcatcgttgctggacataccctgaggtttatccagcaacaaaacgccgttaatgtcgcgaccgcgacgacgaggacgactcattagtcctccttgctgtcgtccgggttaacacgacgttcttcgtcatgtttgaccacgctggtcaccaggttactcatgcgcatcccttcaaccagagagttgtcgtagaagaaggtcagttccggcacgatacgcaggcgcatcgctttccccagcaggctgcggatgaaaccagaagcttcttgcaacgctttgatgcccgctttaaccgcgtcttcatctttgtcgttgaggaacgtcacatatactttggcatacgccaggtcgcgagacatttcgacaccggaaacggtggtcatcatgcccaggcgaggatctttaatttcacgctgcaggatgagagcgatctctttttgcatttcctgcgctacgcgctgcgggcgaccaaattctttcgccataataaattctcctgacaaaaaaggggctgttagcccctttttaaaattaatttcaggtggaagggctgttcacgttgacctgataagacgcgccagcgtcacatcaggcaatccatgccggatgcagcgtaaacgccttatcccgcatggaaccctaaaaaccttaagcaatggtacgttggatctcgatgatttcgaatacttcgatcacatcgccagtgcggacgtcgttgtagttcttaacgccgataccacattccataccgttacggacttcgttaacgtcatctttgaagcggcgcagggactccagctcgccttcgtggataaccacgttgtcacgcagaacgcggatcgggttgtgacgtttaaccacaccttcggtaaccatacagcctgcgatggcaccaaatttcgggcttttgaacacgtcacgaacttccgccagaccgataatctgctgtttcagttccggagacagcataccgctcatcgccgctttcacttcgtcaatcaggttatagatgacggagtagtaacgcagatccaggctttccgcttcaatcactttacgtgcagaggcatcagcacgtacgttaaagccaaccaggatggcgttggacgccgcagccagggtggcgtcggtttcggtgataccacctacgccagaaccgatgatcttcactttaacttcgtcagtagacagtttcagcaaggagtcggagatcgcttcgacagaaccctgtacgtctgccttcaggacgatattcacttcgtgaacttcgccttcggtcatgttggcgaacatgttctcgagtttagatttctgctgacgcgccagtttaacttcgcggaatttaccctgacgatagagtgcaacttcacgcgctttcttctcgtcacgtacaacggtaacttcatcacccgcagccggtacgccggacaggccgaggatttccaccggaatggacggacccgcttccagcacttcctgacccagttcgttacgcatcgcacgaacacgaccgtattcgaagccacacagaacgatatcgcccttgtgcagagtaccttcacgtaccagaacggtagcaaccggaccacgacctttatcgaggaaggattcgataaccgcaccgctcgccatacctttacgtaccgctttcagctccagaacttccgcctgcagcaggatagcgtccagcagttcatcgataccggtacccgctttcgcagatacgtgtacgaactggctttcaccgccccactcttccggcaggatgccgtactgggagagttcgttcttaacgcgatccggatcagcttctggtttatcgatcttgttcactgcaaccaccaccggtacctgcgccgctttcgcgtgctggattgcttcgatggtctgcggcatcacaccgtcgtcggcagcaacaaccaggactacgatgtccgttgcctgcgcaccacgagcacgcatactagtaaacgcggcgtgccccggggtgtccaggaaggtgatcatgccgttttcagtttcaacgtggtatgcaccaatgtgctgggtaatgccgcccgcttcgccagaggccactttcgtactacgaatgtagtccagcagagaggttttaccgtggtcaacgtgacccatgatggtcacaaccggcgcgcgcggttcagccgcagcacccgtgtcacggtcgctcattaccgcctcttccagctcgttttcacgacgcaggataactttatggcccatctcttcagcaaccagctgtgcggtttcctgatcgataacctggttgatggttgccattgcgcccagtttcatcatcgctttgatgacctgagagcctttaaccgccatcttgttcgccagttcgccaacggtgatagtttcgccgatcacaacgtcacggttaacggcctgagcaggcttctggaagccttgctgcaggctagaacctttacgttttccgcctttaccgccacgtactgctgcgcgtgcttcttcacgatcagctttactttcagcgtgtttgttgcctttcttcggacgcgctgctttcgcgttacgaccacggccacggccgccttcgacttcacgatcgctttcgtcttctgcctggcgagcatgttgagaagtagtgacgtgataatcgctggaatcttcagtcggttccgcgttatcagtccatttgttttcttccgccatacgacgtgcttcttcagcaacgcgacgtgcttcttcttcgagtttacgacgcgcttcttcttcagctttacgcttgagctctgcagcttcctgctcacggcgggctttttcagcctgggcgtttttagtcatatcgtcttgttgattgctcactttgtctttttccgcagcttcacgtttcgcttgttcagcagcttcacgcttagcttgttctgcggcctcacgttcagctttttgttgcgcctcgcgtttagcgctttcttctgcctcacgacgggcttgctcttccgcttcacgctgcgcttgctcttccgctgcaaggcgttcagcctcttgcggatcgcgtttcacaaaggtgcgtttcttgcggacttcgatttgtacgcttttgctttttccaccggtaccaggaatgttaagggtgctgcgtgttttacgttgcagcgtcaatttgtccgggccactatttttctgattcaggtggtcaatcaaagtctgtttctcttgtgcagacacagagtcgtcagcagacttccggatacctgcatcagcaaattgctgtaccaggcgttccacggaggtctgtcgctctgcggccagcgttttaatcgttacatctgtcatgctgttccttcctgctacagtttattacgcttcgtcaccgaaccagcaaatattacgggcagccataatcagtgctccggctttttcgtcggtcaacccttcgatatcagccagatcatcaatgccctgttcggcgagatcttccagcgtacaaacgccacgggcggccagtttgaatgccaaatcacgatctaccccttcaaggttcagcagatcgtcagccggtttgttatcaccgaggctttcttcctgggcctgtgcaatggtggccagtgcatttttagcacgctcgcgcagtgcttcaacggtcggctcatcaaggccttcgatttccaacagctctttcatcggcacataggccaattcttccagcgtgctgaagccttcttctaccagaacagtcgcgaagtcttcgtcgatgtcgagatatttggtgaaggtgtcgatcgctgcgtgcgcttccgcctgatgcttagcctgcaggtcgtcaacggtcatcacgttgagttcccaaccgctcagctggctagccagacgcacgttctgaccgttacggccaatcgcctgcgccaggttaccggcttcaacggcgatatccatggtgtgtttatcttcatccaccacgatagaagcaacgtctgccggtgccattgcgttaatcacgaactgcgccgggttatcatcccacaggacgatatcgatacgctcgccacccagttcagtagacaccgcctgaacacgcgcgccacgcatacctacgcaagcacctaccggatcgatacgtttatcgttggttttcaccgcgattttcgcacgagaacccggatcgcgagccgctgctttaatttcaatcacttcttcgccgatttctggcacttcaatacggaacagttcgatcagcatttccggcttggaacgagtgacgaacagttgcgcgccacgcgcttccgggcgaacggaatagagcacgccacgaacgcggtcgccagggcggaagttttcacgcggcagcatatcttcgcgcaggatcacggcttcagcgttgttgcccagatccagagagatgttgtcgcggtttacttttttcaccacgccggtgatgatttcaccttcgtgttcacggaactgatcaaccaccatcgcacgttcggcttcacgcactttctgcacgataacctgttttgccgtctgggtagtgatacggtcaaaggtaacagactcaatctgatcttcaacgtaatcgcccaggttcaggctttcatcttcataacgtgcggcttcaagggtgatttccttggtcggctgggtgacttcatcaacaactaaccagcgacggaaagtgtcaaaatcaccgcttttgcgatcgatctgtacgcggacgtcgatctcttgttcatattttttctttgttgctgtcgccagcgcgctttccaatgcttcgaaaatcttctcgcgaggtagcgccttttcattggatacggcttcaactacagccaaaatttctttgttcatcgcgggcttttcacctcatccagactattaaaagtggggaaccaggttcgccttctggatattactcagcgcgaacacttcatctttaccttcgacggtaactgtgatcatttcaccgtctaccgctttgataacgccctgccatttacgacggttttgtaccgccatacggagaaccagagtcacctcttctccgacaaaacgggcgtagtgttcagccgtgaacagtgggcgatcgagacccggactggagacttccaggttataagcaacggtgatgggatcttcaacatccagcacagcacttacctggtggctcacatcagcacaatcatcaacattgatgccatcttcactatcaatatagatgcgcagtgtggatgtgcgaccgcgaataaattcgatgccaaccagttcaaaacccagggcctcaactggcgcagtaatcatctctgttaatttttgctctaatgtggacaagcccacccccaagacataaaaaaagggcctaaagcccagttattctgtagtcagataacaaaaaaccccgataaatcggggctttatataactgaaccctataaccgcaactgcggtctggagcactttccagaaggattttttcaaatcccactacgaaggccgaagtcttcacagtatatttgaaaaaggactctaagggaaagtggttgcgggggccggatttgaaccgacgatcttcgggttatgagcccgacgagctaccaggctgctccaccccgcgcctgaaacgtggcaaattctactcgttttgggtaaaaaatgcaaatactgctgggatttggtgtaccgagacgggacgtaaaatctgcaggcattatagtgatccacgccacattttgtcaacgtttattgctaatcatgtgaatgaatatccagttcactttcatttgttgaatacttttgccttctcctgctctcccttaagcgcattattttacaaaaaacacactaaactcttcctgtctccgataaaagatgattaaatgaaaactcatttattttgcataaaaattcagtgagagcggaaatccaggctcatcatcagttaattaagcagggtgttattttatgacgacgattctcaagcatctcccggtaggtcaacgtattggtatcgctttttctggcggtctggacaccagtgccgcactgctgtggatgcgacaaaagggagcggttccttatgcatatactgcaaacctgggccagccagacgaagaggattatgatgcgatccctcgtcgtgccatggaatacggcgcggagaacgcacgtctgatcgactgccgcaaacaactggtggccgaaggtattgccgctattcagtgtggcgcatttcataacaccaccggcggcctgacctatttcaacacgacgccgctgggccgcgccgtgactggtaccatgctggttgctgcgatgaaagaagatggcgtgaatatctggggtgacggtagcacctacaaaggaaacgatatcgaacgtttctatcgttatggtctgctgaccaatgctgaactgcagatttacaaaccgtggcttgatactgactttattgatgaactgggcggccgtcatgagatgtctgaatttatgattgcctgcggtttcgactacaaaatgtctgtcgaaaaagcctactccacagactccaacatgcttggtgcaacgcatgaagcgaaggatctggaatacctcaactccagcgtcaaaatcgtcaacccgattatgggcgtgaaattctgggatgagagcgtgaagatcccggcagaagaagtcacagtacgctttgaacaaggtcatccggtggcgctgaacggtaaaacctttagcgacgacgtagaaatgatgctggaagctaaccgcatcggcggtcgtcacggcctgggcatgagcgaccagattgaaaaccgtatcatcgaagcgaaaagccgtggtatttacgaagctccggggatggcactgctgcacattgcgtatgaacgcctgttgaccggtattcacaacgaagacaccattgagcagtatcacgcgcatggtcgtcagttgggccgtctgctgtaccaggggcgttggtttgactcccaggcgctgatgctgcgtgactctctgcaacgctgggttgccagccagatcactggtgaagttaccctggagctgcgccgtgggaacgattatagtatcctgaataccgtcagtgagaacctgacctacaagccagagcgtctgacgatggaaaaaggcgacagcgtgttcagcccagatgatcgtattggtcaattgaccatgcgtaacctggatatcactgatacccgcgagaaacttttcggttatgccaaaactggcctgctttcctcctctgccgctagtggcgtgccgcaggtggagaatctggaaaacaaaggccagtaattcgacatcaaccctgcccttcaggggtggggttaccttgcttatcctctgtaaactcctttctgagcatcacataatcgaaaacatcatggtttgcatccacaacccgactgtctcctttatagtgtgcaatcacttcctcaagcgtttgcggctgttccggctttgttacccccatccacgcattaataaggtaattattgtaagctgtgctaaagatgttgttttccgttgtgcgatccacgccatccccaagaacggggctataccagataaacatcgggacatgatatgcctgctggctagcctccctgcctccatgaaaatagacgttcttcttcgtagggtcacgttccaggccgtggtcggcaaaatacatgacgctggcgcggcgatcttttaataattcaaaaacctgacctagcaaactatctgtgtaatgaatggagttgtcatagcaggcatcctgatcgtcctgcggttgaaacacggcgctggattgcggataggcgctacaagccggttcatggcttccatttaaatgaagaacaatcagtttcttttgctgcgtattttgctgtaatgcttggcttaaatgcggcaacaacaattcatcaaatcctctgacataaactgtttccatggcgcgcatggcgatactggtaactgctgtaccattctgccgaaaagcggattggctgcttagccagaaagtctgaaatcctgcttgattagccatattaataatgttgtcggggtaattatgaatgtcatgactcaaaacagaatcagcagttaaagaaaggggaacgctcagcgcagtgtaaggtgcgccgcttattgcttgattaaacagtttgatctgttttctttgtgcttcaacttgcggtgtcgtagagcgtgtatatccatacaaagacatattgtcgacacgtacagactcccccacaatcaacacgtaggtatcaatacctgtatccctgacacttaattgaaaatacggcaccgtgtttgcaatactgagtaatctttgatgctctttcgctgctaaagcaaaatagttgagattgaaaaacggcgtataggtagcaaatcggctcgctagtatatatggactgaacgcttttttattttttgcatctttataagcaaattgacaagcggaaaataaactgccgctaatgacaatcagcaataatattcctgtcactttttttgtcggcaaggaaacatcatattttattattactgccaaaaaaagaagggataaaaaagcaaaggcacatagataagggatatacatccccagcattttgacaacttcatccggatcactctggagcacactaatcgcaaatccatcattgaaagttgtaccaaaggtacaccaactatagaggctaatactcatgtctgccgcagtcagtaacacaaatggtgcggcaacaagcaggcgaagcggaagggaacttatacgttttacaaccaggatggtcagaacgaagaacagcaagcgctgaaccatatgcgctccggaagaagcgactaagttcgtaataccaaaaacaataacacaaagatacaacaaccaatgagatttaaaagttctagcaaatttgttgaatactgtcatccagaaatccaagttcacaaccaatataaacaattatcaacaatgtttaattttatatcagacatgtttttcaactctgatccatatcagaacgaaacactgttagttttttctttttaaatgatgcggccattgcgttctcagtaattaaataacattatcaatgcgtctctaaacattacgcagaacgtagccatcagtcgttatactgacaggagcaggatggtttatcgagaagtaaacatatccgtattcgtaccggaactggagttgacacaataaagtgccaattatgtcagtagaagggaaaaatttataactaaggcgtaccggcaccatcgtttcaaggtaccagctacgagtaaagcaactggacgagatacagatacctgacaaccattcctcagaccaggaccaaaacgaaaaaagacgcttttcagcgtctcttttctggaatttggtaccgaggacgggacttgaacccgtaagccctattgggcactaccacctcaaggtagcgtgtctaccaattccaccacctcggcacggatactactttttagttcgggatatcgctggtcggcttagccggagcagctggctgagtttgttcggttttcgccggtgcactcagattttcccattcgctacctttattggttttgttgctattgatgttacccagcaccagactgatgatgaagaataacgttgccagcagcgccgtcatgcgggtcatgaagttaccagaaccactactaccaaacagcgtagcggaagcgcctgctccgaaggaggctcccatatcagcgcctttaccttgctgcagcatgatcagaccaacaaggccaattgccacaataaggaaaactactaaaagagcttcatacataatcaacctgttccttgcggagttgccgcgtaccaatgcttcaaccaataaagcgggagtttttaatcttccccactgaagcgggtgtgaatactaaccaaagcgaatgaccttcgcaagggcaattttatcgcattgtatcaactgcggaaaaaaacagcaaaaccgatgtgttcgctgagaaaaaaggcgacaatcgccgcctttttagccagttatctaacgctttaaacggcttttactgcatcggcgatgcggtgtgcaaattcagtcacctgcgcttcgtcttcgccttccaccatcacgcgaattaacggttcggtgccggatttacgcagcaacacgcgtccacggttgcccagcgcagcttcaacctctgcggtcacggctttaacactctcatgctcaagtggatcgccgctacctgcggtgtaacgtacgttaaccagaatctgcgggaacattttcatgccgctgcaaaggtcgtgcaggctcatatggttacgtgccatcgccgccagcacctgcaagccagcaacgatgccgtcaccggtagtagttttatccagcaggatcacatgaccggaattctctgcaccgatacgccagcctttctcctgcattttttccagtacgtagcggtcacccactttcgcgcgcgcaaatggaattcctaactgtttcagcgccagttcaagccccatgttgctcatcaatgtacccacagcgccaccacgcagctggccctgacgaagaccttcacgcgcgatgatatacatgatctgatcgccatcgactttattgccttcatggtcaaccataatcacgcgatcgccatcgccgtcgaaggcaataccgagatccgctttttcagccagcacacgagcctggagcgcgcgaacgtcggtagcccccacttcggcattgatgtttacaccgtttggctcacaaccgatagcgataacgttcgcccccagttcgcgcagcacgttcggcgcgatgtgataagtcgcaccgtttgcacaatccaccacaatcttcagttcactgaggctaagttcgttcgggaacgtggctttgcaaaactcgatatagcgacccgcggcatcaacgatacggctggctttacccagttctgcgctatcaacgcagctgatctccttttccatttccgcttcgatggcctcttctaccgcatccggcagtttggtgccgtcgatagagaagaatttaatgccattatcgtagaacgggttatggcttgcagatatcacaattccggcctctgcgcggaaggtacgcgtcagataagccacggccggtgttggcatcgggccagtgaagagtgcggaaaggcccgctgccgccagacccgcttccagtgcactctccagcatatagccagaaatacgcgtgtctttaccaataataatcttacgggagccgtggcgcgccagcactttacccgcggcccaacccagcttaagcacaaaatcaggtgtgatcggcgcatcccctacacgaccacgaatcccatcggtaccgaaatatttacgattactcatagcgtttgttttcctttgcagacagagtggcttccaccacccgcatcgcttctacggtttctttgacgtcatgaacacgaatgatgtgcgcgccttgcattgcggcaatgaccgcacaggccagactaccgctcaggcgctcggacggccccacgttcagcagctgcccaatcatgctttttcgactcatacccaccaacagcggcaggttgaaatggtgaaattcagccaggcgcgccagtaaactatagttatgggagagatttttaccgaaaccgaatccggggtcgagcaacaatttctcttttgcgatacccgcctgctcgcaacgtgctatttgctcaataaagtagcgattcacttctgcaaagacatcgtcatacttcggagcttcctgcatggtttttggatttccctgcatatgcatcagacaaaccggtaaaccggtttctgcagccgcctccagagcgccaggttcggaaagggagcggatatcattaataatgtgagcgccaactttcgcactctcacggatgacttctggtttggatgtatcgacactgatccagacttcgaagcgttgagcaattgcctcaaccacaggaataacacgttgcaactcttcttcaacgctaacttccgccgcccctgggcgcgtggactcgccaccaacgtcaatgatcgtcgcgccagcgttgatcatcagattcgcatgtttcaccgcatctatcaggctgttatgcgtgccaccatcgctaaaggaatcaggcgtgacgttgaggatccccattacgtgaggatggctaaggtccagactagtaccctgggcaaagagtttcatgatgttatccctggtatgaattgataagaaaaaaccccggagcacgccccggggttttcggtacaaatacagtcatctgatgcgggaacttacttgtcgcctaactgctcactcatggtgttacccgggttcggcgtacgcggttcatcaaccggacgaggagcctttggactaccattgtcgccagaattgttagaagcgcctggttcttcccagcccgctggcggacgtacatcgcgacgtgccatcaggtcatcaatctgcggtgcgtcgatagtctcatatttcatgagagcatctttcatcgcatgcagaatatccatattgtcggtcagaagctgacgcgcacgattatagttacgctcaatcagtgctttcacttcctggtcgatgatacgtgcagtttcatcggacatatgtttcgctttcgctacgctacggccgaggaacacttcaccttcttcttccgcgtacagcagtggacccaatttctcagagaagccccactgagtcaccatgttacgtgccaggttggtcgcaactttaatatcgttggacgcaccggtagatacatgttccggcccgtagatgatctcttctgccagacgaccaccgtacagcgtagaaatctggctttccagtttctgacggctggcgctgattgcgtcgccctcaggcaagaagaaagtcacacccagcgcacgaccgcgtgggataatcgtcactttgtgcaccggatcgtgttccggcaccaggcgaccgataatcgcatgacccgcttcgtggtaagccgtgctttctttctgcgcttccgtcatcaccatggagcgacgttccgcacccatcatgattttgtctttcgctttctcgaactcaaccatgctcacaacgcgtttgttgccacgagcagcgaacagtgccgcttcgttcaccaggttcgccaggtcagcaccggagaaaccaggagtaccacgggcaatgattgccgcgtcgatatcgggtgccaatggtacgcgacgcatgtgaactttcaggatctgctcacgaccgcgaacatctggcaagccgaccacaacctgacggtcgaaacggccaggacgcagcagggccgggtcgagaacgtccggacggttagtcgcggcgataacgatgataccttcgttaccttcgaagccatccatctcaaccagcatctggttcagagtctgttcacgttcatcgtgaccaccgcccagaccagcgccacgctggcggcctacggcgtcgatttcatcgataaagatgatgcacggtgccgctttcttcgcctgttcgaacatgtcacgaacacgggatgcacccacaccgacgaacatttctacgaagtcagaaccggagatagtaaagaacggaactttcgcttcgcctgcaatcgctttcgccagcagcgttttaccggtacccggaggaccgaccatcaagacgcctttcgggatcttaccgccgagtttctggaagcggctcggctcgcgcagatactcaaccagttcagcaacttcttcttttgcttcgtcgcagcccgcaacgtcagcaaaggtcgttttgatctgatcttccgtcagcatgcgcgctttgctcttaccaaagctcatggcacctttgccaccgccgccctgcatttgacgcatgaagaagatccagacaccaatcagcaacagcatcgggaaccaggagatgaagatagaagccagcaggcttggttcttcaggcggttcaccgacaaccttgacgttcttggtcaacaggttatccagtaatttcggatcctgaaccggaatgtaagtggtataacggttactatctttcttggtaacgttgatttcacgtccgttgatacgcgcttcacgaacctggtcgttattgacctcttgtaggaaggtagagtaatccaccttacggccattagactcgctgggcccaaagctctggaatacactcatcagcacaacggcaatgaccagccagagtattaggtttttcgccatgtcactcaagggattaacctcttattacaactgtgttaaaaacagcgtcaggatactctatatccagcatctttcaaactttcgtctgaaatctcccggttagggtttacgcccggtcgctacaatatacacttcccggctacgtgcacgagaagagtccagcttacgaactttgaccttcgtaaacagggagcgaatttcccttagatactcatcgaaaccttcgccctggaacaccttcactacaaaactgccacctggcgctaatacatcacgacacatttctagcgccagttccaccagatacatggcacgggggatatccaccgccggtgttccgctcatgtttggtgccatatcggacatgacaacctggactttgctgtcgccaacgcgctccagcagtgctttcatcaccagttcatcacgaaaatcgccctgaagaaagtccacaccaacgataggatccataggtaaaagatcgcaagcgatgatgcggcctttgccgccaatttgggtgaccacatattgactccaaccacccggagcagcaccaaggtcgacaaccgtcattcccggtttaaagagtttgtcactttgctgtatttcatcaagtttaaaccaggcacgggaacgtaacccctttttctgtgcctgttgaacatatttatcgctaaagtgttcctgaagccagcggctggagctggcagaacgcttcttacctgtcatttaactttcccatggggataactcatcgtaaccaattgcgtaaatttttacgcgcctatttggtgatatatgggagatggcggtagaatgacccgttttcaatcccaacgtaagcaaaaaatacgatgaatctgagtactaaacaaaaacagcacctgaaaggtctggcacatccgctcaagccagttgttctgcttggcagtaatggtttgaccgaaggggtgctggccgagattgaacaagcgttagagcaccatgaactcatcaaggtgaaaatcgccaccgaagatcgcgaaactaaaaccttgatcgtggaagctatcgtgcgcgaaaccggcgcctgtaatgtacaggtcatcggtaaaacgctggtgctttatcgcccaactaaagaacgtaaaatcagcctgccacgctaagattatcctaaagttacacacatttgctgtgtaaaacgaggggttttccgcaggcaggagagcaaaatgccacgctctgttcgttgataaaaggccgcatagcggcctttttcctttctttacaatacatcaacatcttgagtattgggtaattcttacaggtattccaccttaattacttcaaattctacttcgccgcccggcgttttgatgaccacaacatcatcttcttctttgccgatcaggccacgagcaatagggctgtttacagaaatcaggttttgtttaaagtcagcttcgtcatcgccaacgatgcgataagtctgttcttcgtcagaatccagattcagcaccgttacggtagcaccaaaaataacgcgcccattgttgggcattttggtgacatcaatcacctgcgcgttgctcagcttggcttcgatgtctttaatacggccttcgcagaaaccctgctgttcacgagctgcgtggtattcggcgttttctttcaggtcgccatgctcacgcgcttccgcgatagcagcaatgatttcaggacggcgcacagatttcagaaaatccagctcttcgcgtaatttttcagcgccgcgtaaggtcatcggaatagcttgcatttgttatacctcttgaatattcctgatagggcaagtcttcacccaccccggctgttcggcctgcccggcataactccttaccgggaccagaagcaaaaaaataccgacccgggtacaagtcccaggtcagctacaattcacattttgatagtcattttaccctgaagttcccgaagggtcatcgtttactttatagggcgttgcgccgtagtatgacggctcgattccaggttgttagcgcgagattatgcgattttccagatttatcatcggattgaccagctgtatagcgttcagtgttcaggccgcaaatgttgatgagtacattactcaactccccgctggtgccaaccttgccctgatggtgcaaaaagtcggcgcgagcgcccccgctattgattaccacagtcagcagatggcgctgcctgccagtacccagaaagtgattactgcgctggcggcgttgattcaactcggccccgattttcgttttaccacgacgcttgaaaccaaaggcaatgtggaaaacggcgtacttaagggtgacttagtggcgcgatttggtgccgatccgacgttaaaacgtcaggatattcgcaatatggtcgcgactttgaaaaaatctggcgtcaaccaaatcgatggcaatgtgttgatagatacctccattttcgccagccacgataaagcccccggctggccatggaatgacatgacacaatgctttagcgctccgcctgccgccgccatagttgaccgcaactgtttctccgtcagcctctacagtgccccaaagcctggtgatatggcttttatacgcgtggcatcttattaccccgttacgatgttcagccaggtacgcaccctcccccgtggttctgccgaagcgcaatactgcgaactggatgtggtgccaggcgacctgaaccgctttacgctgacgggatgcctgccacaacgttctgagccgctcccgttggcttttgccgtgcaggatggagccagctatgccggtgcaattctgaaagatgagttaaaacaggcgggtatcacctggagcggaacactgctgcgccagactcaggttaacgaacctggaacggtagttgccagtaaacagagcgccccgctgcacgatctgcttaagattatgctgaaaaagagcgacaacatgatcgccgatacggttttccgcatgataggccatgcgcgcttcaatgtgcctggaacatggcgggccgggagcgacgccgtgcgtcagatcctgcgccagcaagccggtgtcgatattggaaacaccattattgccgatggtagtgggcttagccggcataacctgattgcccccgccaccatgatgcaggtgctgcaatacattgcccaacacgacaatgaacttaactttatctccatgctgccgctggcgggctatgacggctctttgcagtaccgtgcaggtctgcatcaggcgggcgtggatggaaaagtcagtgcgaaaaccggtagcttgcagggggtatataacctggcgggattcattaccacagcgagcgggcaacgaatggcgtttgtgcaatatctttctggctatgcagtagaacctgcggatcagcgtaatcgccgtattccgttagtgcgttttgaaagccgtttgtataaagatatttatcagaacaattaatcaaaaagaaaccccggcacatggccggggcttcagattattgacaaagtgcgctttgtttatgccggatgcggcgtaaacgccttatccggcctacaaaatcgtgcaaattcaacatattgcaattctcttgtaggcctgataagcgtagcgcatcaggctgatttggcgtttatcatcagtgattaacgcttgtaaatgaactcaacgccttcttcgtcgtcttcgtcccagtcgtcatcccagtcttcatcatcctcttcagcaatctcttcaagctgctggcgatgataatcatcccacatgaattcgactttctctggctgtttcgcttcttcagcctgcacgaccgggttttcaatgataaaggtcatcacatcccagcagagatctttcacgcccagtccactcgccgcagagatcagataatatttatcttcccagcccagcgcctcagcgatcgctttcgctttctcttcggcttctaccttatccagcagatcgatcttgttgaacactaaccaacgcggtttcgtcgccagatcctggctgtatttttccagctcgctgataataatacgcgcgttttcaaccggatcggtgccgtcaatcggatcgatatcgatgaggtgcaacaggacgcggcaacgttccaggtgcttcaggaagcgaatgcccagacctgcgccttccgcagcgccttcaatcagtcctggaatatcggcaacaacgaagctcttttcgttgtccattcgtaccacacccagacttggcaccagagtggtaaacggataatccgccactttcggtttagccgcgcttaccgcacgaataaaggtgcttttacccgcgtttggcatccccaacataccgacgtcagccagcagcatcagctccagcagcagctcgcgcttatcgcccggcgtgccgttggttttctgccgcggtgtacggttaacggagcttttgaaacgggtattgcccagaccgtgccagccgcccttagcaaccagcagacgctgaccgtgtttggtcatatcgcccatggtttcaccagtaccctggtcgattacacgcgtacctaccggcactttaatcgtcacgtctttaccgcgcttaccggtacagtcgcggcttgcgccattctgaccgcgctctgcacggaaagatttttcaaaacgataatcgataagcgtgttcaggttctcgtcggcttccatccatacgtcaccaccatcaccgccgtcgccgccatccgggccgcctttcggaatatacttttcgcggcggaagctcacgcaaccattaccgccatcacctgcaacgaccagaatgcttgcttcatcaacaaacttcattttattctccgtaaatcattcgcctgcgcggggttggcttaccaccgttgtatgcttacgtaatccgccccaaatacgatgaccaatggcggaatacatcgcgcccgcaaccacgacaaacgcaccgagataacctaaaaggtttaacatcggtctggcgaagaaatcgggccaggccagacttaaaagatcactaaaaaacagcgtaaacagtggggtgagcgtgatgatcgcgctcacctgcgctgcctgccagcgagccatcgcttccgccagggcgccatatcctaccaaggtattcagtccgcaaaaaattaaacatgcgagctgccagtggctaagctgcgctatcactccaggctttgccagagggaagagcgcaattgtacataaagtgtacagtaaaaacaggatctgcggactggccagccgacgcaataaaaccttttgcgccacgccataactcacccaaaccgtcgccgcaccgaccccaaagataactccccaggtgtaatcggtgagctttgtaaatatctcgaccagactggtgttaaaaaacatcaccaggccgctcaggagcatcaatgcccctacaacctgagtgctgcgcattttctctttgaggataaatacgctggcaaccatcatgccaactgggctgagttgcccaatcacctggctagcggtcggactcaggtattgcaaggaactgctgaacaggatgaagttcccaaacagcccggcggtcgccactgccaacaaaatcaaccagcgtggcttacgaaacacgcgtaatggcggcaacctcttcttcaccgcaagaatggcacccaggccaatactcgccatcaagaaacggtaaaacacgattgtcggaggttccatcacctccagcacctgcttcattgcgattggcaacgccccccagcaaattgctgtggtgagcgccaaaagaatgccaatgcctgcctgctgcttcataccgtattccctgcaaagcgcatttgcggattaacgtcgcaccatgcgcatttttaccggttatcgaatgtaaaaagccccgcaacgtgttgcggggctttcatccgttaccgggacgcgaaaaacttattcagcttcgatgctgataaatttacggtttttcgggcctttaacttcgaatttcactttaccgtctgctttagcaaacagagtgtggtcacgaccgcaacctacgttagcgccagcgtggaatttggtaccacgttgacgaacgatgatgctacccgccagaacggattcgccaccgaaacgcttaacgcccaggcgtttagcttcactatcgcgaccgttacgtgtggagccgccagcctttttatgtgccatttgaaatctctcctcaggtcttaggcgctgatgccagtaattttcacatcagtgaaccactgacgatggccctgctgcttacgatagtgtttacgacgacgaaacttaacgattttaactttctcgccacgaccgtgagcaacaacttcagctttgattacgccgccatcaacgaaaggaacgccgattttgacttcttcaccgtttgcgatcatcagcacttcagcgaactcaacagtttcgccagttgcgatgtccagcttttccaggcgaacggtctgaccttcgcttactcggtgttgtttaccaccactttggaaaaccgcgtacatataaaactccgcttccgcgcacaccttttcaatgattcagagtgcgctataaatattcacaatagggcgcgaatattacgcaaaacgcacgcctttgacaagtgctacagtcaatacacgaagaaaaaaaacacaacttgtacggtaacgtttatctgtgccattttttcagtacaatcaccctatattcctaaccataaaccctaagttgcctttgttcacagtaaggtaatcggggcgaaaagcccggcttttgcgatgaatttagaaaaaatcaatgagttaaccgcgcaagatatggcgggtgttaatgcggcaatccttgagcagcttaattccgacgtccaactgatcaatcagttaggctattacatcgtcagcggcggcggtaaacgtattcgtccgatgattgctgtactggctgcacgagctgttggctatgagggaaatgcgcatgtcaccattgctgccctgatcgagtttatccacacggcgactctgctacacgacgacgttgtggatgaaagtgatatgcgcaggggtaaagctaccgccaacgccgcatttggcaatgccgccagcgtgctggtaggcgattttatttatacccgcgctttccagatgatgaccagcctcggtagcctcaaagtgctggaagtcatgagtgaagccgtaaacgtcatcgcagaaggtgaagttctgcaactgatgaacgttaacgatccggacatcactgaagaaaactacatgcgcgttatctatagcaaaaccgcgcgtctgtttgaggctgccgcgcagtgttccgggattctggctggctgtacgccggaggaggagaaaggcctgcaggattatgggcgctatctcggcactgctttccagttgatcgacgatttactcgattacaatgccgatggcgaacagttaggtaaaaatgtcggcgacgatctgaacgaaggtaaaccgacgctgccgctgctgcatgcgatgcatcatggcacaccagaacaggcacagatgatccgtaccgccatcgaacagggtaacggtcgccatcttctggaaccggttctggaagcaatgaacgcttgtggatctcttgaatggacgcgtcagcgtgccgaggaagaagcagacaaagccatcgcagcgttacaggtgctcccggacaccccttggcgagaagcactcatcggcctcgcgcacatcgctgttcaacgcgatcgttaatcccctcccctcatcccgcgcagcgcgcgggatggttccagtaagttccataaaaacacttattcagctctataacacctgaaaaatagggatgtgcatctttatatattctgaatattcacactctttacaggaactttttagagcaataggccatcaggagtatagtgatgctcgacagaagaagtgttctgaatgaaagcgactaacttaaggagtgaggaaaaatggaaagtaatttcattgactggcatcccgctgacatcattgcgggtttgcgcaagaagggaacgagtatggcggcggaatctcgcagaaatggtttgagttccagtacgctggcgaatgcattaagccgcccatggccgaaaggagagatgattattgcgaaagccctgggaactgacccctgggttatctggccaagtcgctaccatgatccgcagacccatgagtttatcgacagaacgcagttgatgcgtagctacactaaaccgaaaaaatgagtggtctggcggtagccccgcgaacggggctgccagctctcagacgattattcgcctttcacacgctcaatatttgcacctaaagcgcgcagtttgtcttcaatgcgttcgtagccacgatcgatgtgataaatacgatcaaccaccgtcgtcccttccgcaatacagccagccagcaccaggcttgcacttgcacgcagatcggttgccataacctgtgcgccagaaagtttttcaacaccgtgacaaataacggtattgctttcgatttcggcgtgcgcgcccatacggctcagctctggcacatgcataaagcggttttcaaagaccgtttcggtgataaacccggtcccttctgccaccaggttcaacagcgtgaactgggcctgcatatcggtcgggaatgccggatgcggcgcggtacgtacgttaacagccttcggacgtttgccatgcatatccaggctaatccagtcttcgccgacttcgatgtccgctccagcgtcacgcagtttcgccagcacggcgtcgagagtatctggctgcgcgttacggcagataattttgccgcgagaaatcgccgccgccaccaggaaagtaccggtttcgatacgatccggcagaacgcgatagacaccgccgcctaaacgttccacaccttcgatgacgatacgatcggtgccctgaccgctaattttcgcacccagcgtaatcaggaagttcgcggtatcgacgatttccggttcacgcgctgcgttttcaataatcgtggtgccttccgccagggttgcagcacacatgatggtcaccgttgcgccaacgctgactttatccatcacgatatgtgcacctttcaaacgaccatcgacggaagctttaacgtaaccttcttccagtttgatggtcgcgcctaattgttcgaggccagaaatgtgtagatcaaccggacgcgcaccgatcgtacaaccgccaggtagactaacttgcccctgaccaaagcgcgctaccagcggccccagcgcccagatagaagcacgcatggttttaaccagatcgtaaggtgcgcagaatacattaacgtcgcgggcatcaatatgcacagaaccattacgttctactttcgcacccagctggcttagcagcttcatacttgtatcgacgtctttcagtttcgggacgttctggatctctaccggttcttccgccagtagtgcggcaaaaaggataggcagagcagcatttttagcgccggaaattgtgacttcgccctggagcttcgttggcccctgaacacgaaatttatccatttagtttgttctcagttaacaattcatatccgctaccggcgaatcgcccatagctcaaaagccgttcagtttgcgatcgcgcgcccactccgcaggggtatacgctttgatgctcacagcatgaatgcggttatccgcaatatattccatcagcggaccatagaccgtctgctgttttttaacccgactcatgccgtcaaacaactcacccacggcaataacctgaaagtggctgccatcgccggaaacgtggacttcctggagggagagagcgttcatcaacacgctctgaatttcattattttccatgggatcttcaatcatcagttaataaaccagcgaaacatcttagagcaaagttgcgctggcataaataagcaaaaagcctcgctgataaatcagacaaggctcgacttgcaggcaggtttgccggacaggcggttaacgccatatccggcctgaaaaaatttaacgaggcagaacatcagcaggcaaattatacaatttcgccagggtatacactttgtcgtttaccccctgaagcgtcacattgttgccctgctttttcgccagatcgataagatggagcagcagtgccagtccccccgtatccacgcgggagacacggctaagatcgatgcaggtaatccccttcaccgcttcctcacgcatttcccaaagcggtagcaaaacgtcctgatccagctctccggataacgccagcgtgtcacccgtctgcatccagctcagactctcgctcattattttttctcttccagagtgattttctgttgagaaatgcttttcagttgcgcagtcaggccgtcgatacctttggtacgcagcagcgttccccactcgttttgtttggtggtgatcatactgacgccttcagcaatcatgtcgtaagcctgccaattgcccgtctgggagtttttacgccactggaagtccagacgcaccggcggacggccattcgggtcaataatggtaacgcgaataggcacaatggttttatcgcccagcggctgttctggcgcaatctgataggtttgaccgtgatacatcgccagcgcctgaccgtaagcctgcttcaggtactcacggaaagcggcaaagtaggcttcacgttgagcaggggtcgcactcttgtaatactggcccagcaccagcgcaccggcgtatttcacctgtacgtatggcagcagttcctgatcaacaatggtacgcagataatccgggttggcccgaatttgcggttgctcattcttcaggcgatcgaacgttttctgcgccgcctcgtccatcagcttatacggattggtctggtctgccgcggttgccgcactcagaggtgcaatcaccagcaaagcgaccatcattaaacgtttaaacatgcgtcggttctcctgaaattatttcgttgtacccacaggttcagtggtttcattattacctggcgcagcagctggcgcatcgccactattcttattgtcatcgcctttactaccgtaaaggaactgaccaatgagatcttccagcaccatcgcagacttagtgtcctgaattgtatcgccatccttcaggatagcagtccccagttccgggtcttcaaaaccgacgtttaatgccagatattgttcccccagcaggccggaagtacgaatgctcaggctactggtatctggaatgtggttataacgttgttcaatttccagcgttacgcgcggcagataggttttcgggtccagcgtaatatccgccacccgacccacaacaacgccaccaatactgaccggagagcgcgctttcaggccgccaatgttatcgaacgtcgcataaagcgtgtaggtcggttcagtacgtatggacgtcacgttcgccgccttcaggcaaacaaacagcgccgccagcagtgctgctaataaaaagatacccacccaaatttcattttttttcgtttgcatgaactcaattcccaaacatcaatgcggtcagcacaaaatccagccccagaacagccagagagctgtggacaacggtgcgagtggttgcccggctaatcccggcagacgtcgggatggcgtcgtagccgttaaacaagctaatccacgtcaccgtgatggcgaacaccacgctcttaatcagacagttgaccagatccatacgccagtcgacggcattttgcattgcgctccagaagaacccgctatcaatgcctttccaactgacgccgaccagagatccgccccagatccccacggcgacgaaaataaccgtcaacagtggtaaactaataaccccagcccagaaacggggagaaataacccgacgcagcggatccaccgccatcatctccatactggagagttgctctgtagcgcgcatcaggccgatttctgcggttagcgcgctaccagcacgcccggcaaacaacaacgcggcaaccaccggccccagttcacgcagtaggcttaacgccaccagcatacccagactggtttccgcactataagtggtcagaaccagataaccttgcagccccaacaccattccgatgaacacgccagaaaccacaataatcagcatgctcaggacgccgacattatagagctggcgcaccagcagcggcgcatgtttgcgaaattccggtttgccgaccagcgcattgaataacattaacccggcccgcccgaacgttctcagggttttaatccctttatgtccgaggctcgccagcgcatttaacagcatgagtggcttaactccctggtaaaagatcagcgtgataatcgccggcaggatagcggaacggaacaggcccgtcagctatcccgtccagaaactgacgtacgcgcggatcaggattcgcctgcaacgcctgggcactgccatgagcgacaatttttttgtccgccaggatccaggcgtgatccgcaatacttaacacttccggcacatcgtgagaaaccaccacacaagtcacgcccagcgcgctgttcagctcagaaatcagcttcaccagtacgcccatggtgatgggatcttgcccaacaaaaggttcatcaaacatgatgagatccggctccagcgcaatcgcacgcgccagcgctgcacgccgcgccatcccaccggaaagttcagaaggcattagtttagccgctccacgcagccccacggcctccagcttcatcatcaccgtactatgcaacaatggcgcgggaagttgggtatgttcgcgcagtggataggcgacgttgtcaaatacgttcatatcagtgaacaacgccccggactgaaataacatgctcatccgtttgcgcactgtatacaggcggctacgagacatcgccggaatattctcaccatcgaaaaggatctcaccatgatctggtgcgatttgcccgccaatcagacggagtagcgtcgttttaccgatgccgcttggccccatgatcgccgtgatcttccctcgcggcacggtcagggaaatattatcgaagatgcagcgattgccacgcgtaaaactgacatcgcgcatatcgactaaattcgccacagactgctccataattcacccttcgtcttgcgttgattttctaagcatggcgctcaatttaaccttgaacccaacatatttacagaatattacccgccgtggttagcgaaagctggcatttgttttactttttagccgcataaagtcaaaattaagcatccgttacggctttctgaaaatcttcagcggaccggcgagtatacctgaagaaaggacgttagatgcttttagctacggcactgttaattgttggtttacttttggtcgtttacagtgccgaccgcctggtttttgccgcgtctattctttgccgaacctttggcatcccgccgctgatcatcggcatgacggtggtcagtattggtacaagcttaccagaagtcatcgtcagccttgccgcgtctctgcacgaacaacgcgatttagccgttggtacagccctcggcagtaacattatcaatatattgctgatcctcggtctggctgcgctggttcgtccttttaccgtccattctgatgttctacgccgtgaattacccttaatgttgttggtcagcgtggtggccggttccgtactctatgacggacaacttagtcgcagcgatggtatctttctcctctttctggctgtgctatggctgctgttcattgttaaacttgcacgtcaggctgaacgtcaggggactgacagcctgaccagagagcagcttgcagagctgccgcgtgacggcggattgcccgtcgcgtttttatggctcggcattgcgcttatcatcatgccagtggccacgcggatggtggttgataacgccacggtgctggcgaattactttgccatcagcgagttgacgatgggtctgacggcaattgctatcggaaccagcctgccggaactggcaaccgcaatagcgggggttcgcaaaggtgaaaacgacattgctgtcggaaatatcattggcgcaaacatttttaatattgtcatcgtgttgggtttacccgcgctgataacgccaggagagattgatccactggcgtacagtcgtgactacagcgtgatgttgctggtgagcattatttttgcgttgctgtgctggcggcgctccccgcaaccgggccgtggtgtaggggtattattaactggcggatttatcgtatggctggcgatgttgtactggttaagcccaatactcgttgaataactggaaacgcattatgagccacgtagagttacaaccgggttttgactttcagcaagcaggtaaagaagtcctggcgattgaacgtgaatgcctggcggagcttgatcaatacatcaatcagaatttcacgcttgcctgtgaaaagatgttctggtgtaaagggaaagttgtcgtcatggggatgggaaaaagcgggcatattgggcgaaaaatggcggcaacgtttgccagcaccggtacacctagttttttcgtccatcctggtgaagccgcgcatggtgatttaggcatggttaccccacaggatgtggtgattgctatctctaactctggtgaatccagcgaaatcacggccttaattccagtgcttaagcgtcttcacgtaccgttaatctgcatcaccggtcgcccggagagcagcatggcgcgcgccgcagatgtgcatctgtgtgttaaagtagcgaaagaagcctgtccgttagggctggcaccgaccagcagcaccaccgccacgctggttatgggcgatgccctcgctgtcgcgctgttaaaagcacgcggctttactgctgaagattttgcgctcagtcacccaggcggcgcactgggtcgtaaacttctgctgcgcgtaaacgatattatgcatacgggcgatgagatcccgcatgttaagaaaacggccagtctgcgtgacgcgttgctggaagttacccgcaaaaatcttggtatgactgtcatttgcgatgacaatatgatgattgaaggcatctttaccgacggtgatttacgccgtgtcttcgatatgggcgtggatgttcgtcagttaagtattgccgatgtgatgacgccggggggaatacgtgtgcgccctggcattctggccgttgaggcactgaacttaatgcagtcccgccatatcacctccgtgatggttgccgatggcgaccatttactcggtgtgttacatatgcatgatttactgcgtgcaggcgtagtgtaaagattcaaggataaacaacaatgagcaaagcaggtgcgagccttgcgacctgttacggccctgtcagcgccgacgttatagcaaaagcagagaacattcgtctgctgatcctcgatgtcgatggcgtactgagtgatggcctgatttatatgggcaataatggcgaagagctgaaagcgttcaatgttcgtgacggttatggcattcgttgtgcgctcacctctgatattgaagtcgctatcattaccgggcgaaaggctaaactggtagaagatcgttgtgccacattggggatcactcacttgtatcaggggcagagtaacaaactgatcgcctttagcgatctgctggaaaaactggcgattgccccggaaaatgtggcttatgtcggcgatgatctcatcgactggccggtaatggaaaaagtgggtttaagcgtcgccgtggccgatgcgcatccactgttgatcccgcgcgccgattacgtgacgcgcattgctggcggtcgtggcgcagtgcgcgaagtttgcgacttattactcctggcgcagggcaaactggatgaagccaaagggcaaagcatatgagtaaagccagacgttgggttatcattgtgctaagtctggcggttctggtgatgatcggcattaatatggccgaaaaagacgataccgcccaggtggtcgtcaacaacaatgatcccacctataaaagcgagcatacggacacgctcgtctataacccagaaggggcactaagctatcgattgattgctcaacacgttgaatattattccgatcaggccgttagctggtttacgcagccggtacttaccacgtttgataaggataaaatcccgacatggtccgtaaaagcagataaagccaagctgaccaatgaccggatgctctatttatatggacacgttgaagtcaacgcacttgtgccagactctcaacttcgcagaatcacgacggataacgcgcagatcaatctggtgacgcaggatgttacctctgaagacctcgtcacgttatacggaacaacatttaactccagcggtctgaaaatgcgcggcaacttacgcagcaagaacgccgagctgattgaaaaggttagaacatcctatgaaattcaaaacaaacaaactcagccttaatcttgtgcttgccagcagtcttctggccgccagcattccggcatttgccgtaaccggagacactgatcagccgatccacattgaaagcgaccagcaatctcttgatatgcaaggcaacgtggttacctttaccggtaatgtcatcgtcacccagggcaccatcaaaattaatgccgacaaagtggtcgttacccgtccgggcggcgaacaaggtaaagaagtgattgacggctacggtaaaccggcaacgttctaccagatgcaggacaacggtaaacccgttgaaggtcacgcttcccagatgcactacgaactggcaaaagattttgtcgttctgacgggtaatgcttatctgcagcaggtcgatagcaacattaagggcgataagatcacttacctggtgaaagagcagaaaatgcaggctttcagcgacaaaggcaagcgcgtaacaaccgttctggtgccgagccagctgcaggacaaaaacaacaaaggccagaccccggcacagaagaagggtaattaattcgttatggcaacattaactgcaaagaaccttgcaaaagcctataaaggccgtcgcgtggtagaagacgtcagcctgaccgtcaactccggggaaattgtcggtctgctggggccaaacggtgccggtaagaccaccactttctacatggttgtaggcattgtgccgcgcgatgcgggcaacatcattattgatgatgacgatatcagtctgctgcctctgcatgcacgcgcgcgccgcggtatcggctatctgccacaggaagcctccattttccgtcgcctcagcgtttacgataacctgatggcggtactgcaaattcgtgacgacttgtctgctgaacaacgtgaagaccgcgcgaacgagctgatggaagagtttcacattgagcacctgcgtgacagcatggggcagagtctctccgggggtgaacgtcgccgtgtagaaattgcccgcgcactggctgcgaatccgaaatttattctgctcgacgaaccgtttgccggggttgacccgatcagcgttatcgacattaaacgcatcattgagcacctgcgcgacagcggcctgggcgtgctgatcactgaccacaacgtgcgtgaaacactggcggtttgtgaacgcgcttatatcgtcagtcaggggcatttgatcgcccacggcacgcctacagaaatcttacaagacgaacacgttaagcgtgtataccttggggaagacttcagactctgatagggtagaagtttgcgacgttttagcaggagagtacgattctgaacatgaagcaaggtttgcaactcaggcttagccaacaactggcgatgacgccacagctccaacaggcaattcgtctgttgcagttgagcacgctggaacttcagcaggagctacagcaggcgctggagagtaatccgctgcttgagcaaatcgacactcatgaagaaatcgacacccgcgaaacgcaagacagtgaaacgctggacaccgccgacgcgctcgaacaaaaagagatgccggaagagctgccgctcgatgccagttgggacaccatttacaccgctggtacaccatccggcaccagcggtgactacattgacgacgagctgccggtctaccagggcgaaacgacgcagaccttgcaggattacctgatgtggcaggttgagctgacaccgttttccgacactgaccgcgctattgctacctctatcgtcgatgccgttgatgaaaccggttatctgactgtcccgctggaagatattctcgaaagtataggcgatgaagagatcgacatcgacgaagttgaagccgtccttaagcggatccaacggtttgatccggtcggtgtggcggcaaaagatctgcgtgactgtctgctgatccaactctcccaattcgataagaccacgccgtggctggaagaggccagactgatcattagcgatcatctcgatctgttagccaatcacgacttccgcactttaatgcgcgtcacgcgtctgaaagaagatgtgctgaaagaagccgtcaatctgatccagagcctcgatccgcgccccgggcagagcatccagactggcgaacctgagtatgtcattccagatgtgctggtgcgtaagcataacggtcactggacggtagaactcaacagtgacagcattccgcgtctgcaaatcaaccagcactacgccagcatgtgcaataacgcgcgcaacgatggtgacagccagtttatccgcagcaatctgcaggatgccaaatggttgatcaagagtctggaaagccgtaacgatacgctactgcgcgtgagtcgctgtatcgttgaacagcagcaagccttctttgagcaaggtgaagaatatatgaaaccgatggtactggccgatatcgcccaggctgtcgaaatgcatgaaagcacgatatctcgcgtgaccacgcaaaaatacctgcatagtccacgaggcatttttgaactgaagtatttcttttccagtcacgtcaataccgagggcggcggcgaagcttcctccacggcgattcgtgcgctggtgaagaaattaatcgcggcggaaaacccagcgaaaccgttgagcgacagcaagttaacctctttgctgagcgaacaaggtatcatggtggcacgccgcactgttgcgaagtaccgagagtctttatccattccgccgagtaaccagcgtaaacaactcgtttgacccaaccgataaggaagacactatgcagctcaacattaccggaaataacgtcgagatcaccgaggcactgcgcgaatttgttacagccaaatttgccaaacttgagcaatattttgaccgaatcaaccaggtctatgttgttctgaaagtggagaaagtcacccacaccagtgatgcaacactgcatgtaaacggtggtgaaattcatgccagcgcggaaggtcaggacatgtacgctgccattgatggcttaattgataagctggcacgccagttgaccaaacataaagataaactgaaacaacactaattgtccgggcaattagcatgtgcatggcggtctgttgtgcggcacaacgggccatttgtacggttaatgctccgagcctgttccactgtttgagtgggcaggttcttaggtgaaattatgacaaataatgatacaactctacagcttagcagtgttcttaacagggaatgtacgcgaagccgcgtccactgtcagagcaaaaaacgcgccctggaaatcatcagcgagctggcggcgaaacaacttagcctgccgcctcaggtggtttttgaagctatcctgacgcgggaaaaaatgggcagtaccggtatcggcaatggtattgccattccgcatggcaaactggaagaagatactctgcgcgccgttggcgttttcgttcagctcgaaacgcctatagctttcgatgccatcgacaaccaaccggtggacttactttttgccctgctggtgccggcagaccaaactaaaacgcacctgcatactctgagcctggtggcgaaacgtctggcggacaaaaccatctgccgccgtttacgcgcagcccagagcgatgaagagctgtatcaaatcattacggataccgaaggtactccggatgaagcgtaattattcggtaatgtctcttttagacgttgtgaggagaaacagtacatggtactgatgatcgtcagcggacgtagtggtagtggtaaatctgtcgccctgcgtgcgctggaagatatgggtttttactgcgtggataaccttcccgtagtgttgttacccgatctggctcgaaccctggccgatcgcgagatttctgccgccgtcagcattgatgttcgtaatatgccggagagtccagaaatattcgaacaggcgatgagtaacctgcctgacgctttcagtccgcaactcctgttcctggatgccgaccgtaataccttaattcgtcgttacagtgacacgcgccgactgcatccgctttccagcaaaaacctgagcctggaaagtgctatcgacaaagaaagcgatttgctggagcctctgcgtagccgagcggatctgattgtcgataccagtgaaatgtccgttcacgagctggctgaaatgctgcgtacccgtctgctgggtaaacgtgaacgcgaactgaccatggtctttgagtctttcggcttcaaacacggtatccctatcgatgcagattacgtctttgacgtgcgcttcttgccgaacccgcactgggatccgaaactgcgtccaatgacaggtcttgataaacctgtcgccgcgttcctcgaccgccacacagaagtacacaattttatctaccagacgcgaagctatcttgagctatggttacctatgctggaaaccaacaaccgtagctacttgacggtcgccattggttgtaccggcgggaagcaccgtagcgtgtatattgcagagcaactggcagactacttccgcagccgcggtaaaaacgtccagagtcgccatcgtacgctggaaaaacgtaaaccatgaccgtcaagcaaactgttgaaatcacaaacaagctgggcatgcatgcccggcctgcaatgaagctgtttgaattaatgcagggttttgacgctgaagtgctcttacgtaatgacgaaggcaccgaggctgaagccaacagcgttattgcgctgctgatgttggattctgccaaaggacggcagattgaagttgaagcgaccggtccacaggaagaggaagcactggccgccgttatcgccctctttaattctggttttgatgaagattaatcttcatcactttgacatacaactcccttcaaactccccccgacaataagaaaatcacgtactgaaatcgttctcaatcaacgtcatttgtacattttgtgcgcttttcactttcagaagaaccttaagaaaaccttaagaggcattgtttaggttttgtttaagttaatcgaccatactggagatcgtcagaaaatatttccaggagatggcatgattcgcttatctgaacaaagtcccctgggcaccggaagacatcggaaatgttatgcgcatccggaagatgcccaacgctgtatcaagattgtctaccatcgtggcgatggtggcgataaagagatccgccgtgagttaaagtactacgcgcatcttggtcgccggttaaaagactggagtggaataccgcgctatcacggtaccgttgagacggattgcggaaccggttatgtctacgatgtgattgcagattttgacggcaagccttccattacgctgaccgaatttgctgaacaatgccgttacgaagaagacattgcacaactgcgccagctactgaaacagctgaagcgttatttgcaggataaccgtatcgtgacgatgagcctgaagccgcagaatatcctctgtcaccgcatcagtgagagtgaggttatcccggtcgtctgcgacaacattggtgaaagcacattgattccactggcgacctggagcaagtggtgttgtctgcgtaagcaagagcggttatggaaacgatttatcgcccaaccggcgctggctattgccctgcagaaagatctgcaacctcgtgagagcaaaacgctggccctcactagccgcgaagcttaatccagctggtgttgttgcataaacggctcaccgcctaactgatacatctgccgtaaaatccacgcctgacggctacgcacgtagccgcttgggctggagactttgaaacgaagtggattaggtaatacagctgccagtaatgcagcttcgctccgggtaagtttgctcgcgggtttgtggaaataacgttgtgccgcagcttcgacgccaaacacaccgtcgccaaattcggcgatattcaggtaaaccgtcaggatacgctttttgctccagaccgtttctatccccagcgttaatccggcttccagcccttttcgaacccagctacgcccatcccataaaaagagatttttggctgtctgttgagaaatcgtactagcaccgcgaatacggttttcattgcgctcgttgtgcgccagggctttctcaatggaagcgacatcaaagccccagtgctcaggaaatttctgatcttctgcggcaatcaccgccagtcccatccacgggctgatttgatccatactgacccagtcagaatgtgccacgtaacgaaaattgccatgcagccaggcgctgacctgtcgctcgaccattaccgcactgaagggaacaggcgcaacgctaaacaacgcgatgcccccgccccagaaaacggcgaggacaaccattaaccgcaaaagaaaacggcgaacgaaactaaacaccgttaagcggcttttactcattcagccagaaccagcacgcgggaaaccagcttatcaatgccgctcgccgcttctgcaatgttctgcgccagcatatatgctggggtggtgacaatcttattgtcttcatcaaccacgatatcatcgacaggacacggcacatgctccgcgcccatctcttccagcacttctgcggtatcgatatcagtaccgatggtcaaacgcagcgggaaatcgaaaattttcggcagcatcgccggggcaatacacataaaaccaagcggttttccggcctgatgcatcgcttgtgccagcgcctttaattcacggtcaacggtgcattcgctaccaagactggcaaaattgcttaaattcttcgccgcgccaaaccccccccggcacaatcaacgcatccagttcagcggcatcggcctgggccagaggacggatttcaccgcgcgttattcgtgccgcttcaatcagcacattgcgcgtttccgtcatcgcttcgccagttaaatggttgataacatcaacctgctgcttatccggtgcaaagcagaccgcctgcgcaccgctgcgactaatagctaacaacgtcaacaccgcttcatgaatttcagaaccgtcatagacgccgcatccgctcagaattacgccaattttcttcattgtgatcatcctttcgcaattgactgaaacacattaatttttttaataaaaatggtacgcatcacacatttaactgattcatgtaacaaatcatttaagttttgctatcttaactgcgtgcggcctgaaaaacagtgctgtgcccttgtaactcatcataataatttacggcgcagccaagatttccctggtgttggcgcagtattcgcgcaccccggtctagccggggtcattttttagtggcttttgccacccacgctttcagcacttctacgtcgtgacgccactcttctttcatctcttcaatccattcaccgacgttatcttcccaggccggaaggtcaggagactgaatttgctgacccagctgttgcagatggcgtaaccccacactccccgccgcacctttaattttatgtccttcctcaacaatgccttttttatcctgcgccgtcagattgctctccagcacgctgacatagcccggcatcatcttctcaaacaccgctaacccgtcggtgatcagcttcggtcctacaagttcgagatactgttccagcatgggaatatcgagcaatgcttcacttttactgttctcttctgtcgtcaccgtactctcctcatcatcctgggtatcccagaatttcttgatcatcgcggttagcgccggaacagaaagcggcttactcagcacatcatccattccagcattgaggtactcttgtttgtctttcagcacgttagcggttaaggccaccagcggcggtaaatcctcgcgcggataacgtttcgtcagttcacgagagatatccagcccggtcatatctggcaactgaatatccagcaacaccaggtcgtattcgcccggtttaaacatctccagcgccgccttgccggtcatggcgacatcaacgctgttacctaatttttccagcacagaacgcgcaacaatcacgttcagttcaatgtcttccaccagcagcacattcagcgccggtaaaggcatatcgtcttcatcaaacgcatcatcgacctcttctgctacgctcggtgcgtggatcgtcaacgtaaaggtactacctttgccctgttcgctggtaaccgtaatatcgccgcccatatttttcgccagacgacgagaaacggccagaccaataccggtgccggtggcaggtttaccgccatgactgtctttcacctggtaatacatggcgaaaattttatccagctcatcctgcggaatgccgataccagagtcttccacttcaaaatgcagcatatcgccttcatcgtagcgcacgcgcacggtaacctggccttgctgggtgaatttgacggcgttactgatgaggttccacaggatctgccgtaaacgcgtcccgtcggtaatgacctgatgcggtaatggcagcgtcggctccaggttaaagcgcaatcctttttgttgcgcctgcaatgcggagagattttccagatcggcaaggaagctggtgaaatcaaccggttgattatcaagctggaccttgcgccgttccatcttatccatgtcgataatatcgttaaagatattccccagcgtgacggcgctaacatggatggtcttgagatatttttcctgctcggcggtgagttcggtatccagcagaatgcggctcagaccgacgataccgttcagcggtgtacgcaattcgtgactgatggtggagataaacgtcgttttgtcgcggctggcccgttcaagcgcatcctgataccgcttacgctcggtaatgtcgcgaccaaagcccatcaaaccgtgacgtttacccacgcggtcgtagtacggcactttacggatttcaaagcaggctttgcgcccgtccgggtaatccagccactgttcataggtcagactcacattatgacggaacactttttcatcggtttcaatgacttttgcggcggcttccggactgtaaacatcagcaggtttcaggtgaaccagttgtttttcgctttttccggtcagcagctccatcgcgcggttacagccggaaaactctttatcttcgttacgataaaaaaccaggtcgggactagcatcaaggaaggaacgtaagaaactggattgctgctcgagctgaatttgtgtctcttcgcgctctttgatttcaattttcagttggccgaaggtttcctgcagttctgcttccgctttttcacgaacggcaatttcctgatttagctgggcaatattatcttttaactgaacgttgaggctcaaatcgcgctcgcgcatctcctccagtttttgcaccagccgactcagacgttgtcgactctcctccagttgctcgacgaccacgcttagaaagtagaccgcccacggcgtaatcagcaaaccaaagaagatagaacgaataacatcaatgctttcgacctgaccatgcagcaccatggttaccgccatttgtaccacaatggcaagaacgacgagggccagcgccagcaacatactgaagcgcaccagacctaacttcatcatcaggtcaacataatactgcgccagcagacgaatttgcttcattagggaattccttcacgacaacctgccccaataatacccaattctgacagttacgttataaattgtgtgagaaatgcggaattcccctcaacgacttactccgttggaggtagccacggacgtcccagcgcgcttccctgtacgccatgttcattcagatagcgatccagctcgaccattcccgtccatcgattttcgcaccacagcggagcaagcagcgtcgggcgacgggcgctggcggaaatgcggtggtagatcacttccggtggcgtatggcgaatcatttctccggcagtgagcgtgtaatcctccagttcaataccgttcaaacgccccgcttcccaggctttcgccataatgctgcctttcacaatatgcagcggatgcagctttatgccgtccacgccggtttcaaccactcgctccagcgtttgcaaacattcagcctgcccttcgccaggcaggccgacaattaagtgggaacacaccttcagcccgcgctgacgtgccagctgggttgtacgctgataacaggcaaaatcatggccgcggttgatgcgatgcagtgttttgtcgtgggcggtttgtagccccagctccagccacacttcgtaaccctggtccttatattcgcaaagcagatccagcaccgcatccggcacgcagtccgggcgggtacccacacacaaaccgacaatattggcctggctcaccgcctgctgatacatagaacgcagcacctgaacttccgcaaaggtgctggtatacgcctgaaagtaggccagatagcgtttagcgcggttaactaaattcgcctggtgcgccagttgctcggcaatggaacgatgctgctgcgcttcatcggcaaagctggcaacattacagaatgtgcagccaccacgcccgatggtaccgtcacggttagggcagctaaaaccgccgtgcagcgtcagcttatgcaccttttgcccataacgacgggtgagatcaccaccaaacatattgactaatttctgtaactgcataatctgatagaccgcgccttgaaaagaggccaaagcctgccatttttagctcaattcggcgatgacctggatcaatcgtcccggcctgcttttatcaactgcataatcaatcaaaattaccgaaatttcatgcataatcacataaatcacttttgcttatcttgtgtcagatttttttatctcctgatggattttaggcaaaaacagtagcatgaaacgtcattaccaattaaggcagtataaaatgctggttttgtcgtcagttcaaggcaggataagggttaacacacctttatgacagtcaggaattgactgtttctctaacgacttcccttttagccttaaagataaaatccattttaatttcagtcatttaataaagaattttgcgctaaagcacatttctgtaccaataagcttgccatttgacctgtatcagctttcccgataagttggaaatccgctggaagctttctggatgagcagcctgctcatcatatttatgcagtaattgagatcccctcttcaccgtattaaccgatgcgaaaaggacaacaagggggcgaatgcgaggcgcgcgtatgacacgcaaaccccgtcgccacgctctttctgtgcccgtgcgcagcggtagcgaagtggggttcccgcagagcctgggggaggttcacgatatgttgtacgataaatcccttgagagggataactgtggtttcggcctgatcgcccacatagaaggcgaacctagccacaaggtagtgcgtactgcaatacacgcactggcccgcatgcagcaccgtggcgcgattctcgccgatggtaaaaccggcgacggttgcggcttgctgttacaaaaaccggatcgcttttttcgcatcgttgcgcaggagcgcggctggcgtttagcaaaaaactacgctgtcgggatgctcttcctgaataaagatcctgaactcgccgctgccgcacgccgcatcgttgaagaagaactgcaacgcgaaaccttgagcattgtgggctggcgtgatgtccccactaacgaaggcgtgctgggtgaaatcgccctctcctctctgccacgcattgagcaaatttttgtgaacgccccggcaggctggcgtccacgcgatatggagcgccgtctgtttatcgcccgccgccgcattgaaaagcgtctcgaagccgacaaagacttctacgtctgtagcctgagcaatctggtgaacatctataaaggtctgtgtatgccgacggatctgccgcgcttttatctggatcttgcggacctgcgtctggaaagcgccatttgcctgttccaccagcgcttctccactaacaccgtaccgcgctggccgctggcgcaaccgttccgctatctggcgcataacggtgaaatcaacaccatcaccggtaaccgccaatgggcgcgtgcgcgtacttataaattccagacaccgcttatccctgacctgcacgacgccgcaccgttcgtcaacgaaaccggctctgactccagtagcatggataacatgctggaactgctgctggcaggcgggatggatatcatccgcgccatgcgtctattagtaccacccgcctggcagaacaacccggatatggacccggaactgcgtgccttctttgactttaactccatgcatatggagccgtgggatggcccggcgggcatcgtgatgtccgacggtcgttttgccgcctgtaacctcgaccgtaacggtctgcgtccggcgcgctacgtcatcaccaaagataagctcatcacctgcgcctctgaagtcggtatctgggattaccagcctgacgaagtggtcgaaaaaggccgcgtcgggccaggcgaactgatggttatcgacacccgcagtgggcgtattctgcacagcgcagaaaccgatgacgatctgaaaagccgccatccatataaagagtggatggagaaaaacgtccgccgactggtaccgtttgaagatctgcccgatgaagaagtgggtagccgcgaactggacgacgacacgcttgccagctaccagaaacagtttaactacagcgcggaagagctggactccgtaattcgcgtactgggcgaaaacggtcaggaagcggtcggtagcatgggcgatgataccccattcgccgtgctctccagtcagccgcgcattatttacgactacttccgccagcagtttgcccaggtgactaacccgccaatcgacccgctgcgtgaagcgcatgttatgagcctcgccaccagtatcggtcgtgaaatgaacgtcttttgcgaagcagagggccaggcgcaccgtttaagctttaaaagcccgattctgctctactccgatttcaaacagctcacgacgatgaaagaggagcactaccgcgcagatacgctggatatcacctttgacgtcactaaaaccacgctcgaagcgacagtcaaagagctgtgcgacaaagccgaaaaaatggtacgtagcggcaccgtgctgctggtgctctccgaccggaatatcgctaaagatcgcctgccggttccagccccgatggcggttggcgcgatccagacccgtctggtcgatcaaagcctgcgttgcgatgccaacatcatcgtcgaaaccgccagcgcccgcgatccgcaccacttcgccgtgttgctgggcttcggcgcgacggctatttatccataccttgcctatgaaacgctgggccgcctggtagacacccatgcgattgccaaagattatcgtaccgtgatgctcaactaccgtaacggcatcaacaaaggcttgtacaaaatcatgtccaaaatgggcatctccaccatcgcctcttaccgctgcagcaaactgtttgaagcggtcggtctacacgatgatgtagtgggcctgtgcttccagggggcggtcagccgcattggtggagcaagctttgaagacttccagcaggatctgctgaatctgagcaaacgtgcctggctggcgcgtaagcccatcagccagggcggtctgctgaaatacgtccacggcggcgaataccacgcctacaacccggacgtggtgcgcacgctgcaacaagcggtacaaagcggcgagtacagcgactatcaggaatacgcgaagctggttaatgagcgtccggcaaccacgctgcgcgatctgctggcaattacgccgggtgaaaacgcggtcaacattgctgatgttgaaccggcaagcgaactgtttaaacgctttgataccgccgcgatgtctatcggcgcgttaagcccggaagcccacgaggcgctggcggaagcgatgaacagcatcggcggtaatagcaactccggtgaaggcggcgaagacccggcgcgctacggcaccaacaaagtgagccgcatcaagcaggtggcttccggtcgctttggggttactccggcgtatctggtcaatgccgacgtcattcagattaaagtcgcccagggcgcgaagccaggcgaaggcggtcagttgccgggtgataaagtcacgccttacatcgccaaactgcgctatagcgtgcccggagtgacgctgatctccccgccgccgcaccacgatatctactctatcgaggacttagcgcagctcattttcgacctcaagcaggttaacccgaaagcgatgatctccgtgaagctggtttccgaaccgggagtaggcaccatcgcgactggcgtggcaaaagcttatgcggacttgatcaccatcgcaggctatgacggcggcaccggcgcaagtccgcttagtagcgtgaaatacgcaggctgtccgtgggagctggggcttgttgaaacccagcaggcgctggttgctaacggcttgcgtcacaagatccgtttgcaggtcgatggcggcctgaaaacgggtgtcgatatcatcaaggcggcgattctcggcgcagaaagcttcggcttcggcactggcccgatggtggcgctcggctgtaaatatctacgtatttgccatctgaacaactgcgcaacgggtgtagcaactcaggatgacaaactgcgtaagaaccactatcacggcctgccattcaaggtgacgaattactttgagtttatcgcccgtgaaacccgcgagctgatggcacagcttggcgtaacacgtctggtggatctgattggtcgcaccgacctgctgaaagagctggacggtttcaccgccaaacagcagaagctggcgctgagcaagctgctggagactgccgaaccgcatccaggtaaggcactctactgcaccgaaaacaacccgccgtttgataacggcctgctgaacgcgcagttactgcaacaggcgaaaccgtttgtcgatgagcgccagagcaaaaccttctggttcgatattcgcaacaccgaccgttctgtcggcgcgagccttagtggctatatcgcccagacgcacggcgatcaggggctggcagccgatcctatcaaagcgtacttcaacggcaccgcaggccagagcttcggcgtgtggaacgcgggcggcgtggaactgtacctgaccggtgatgccaacgactatgtcggtaaaggcatggcgggcggcttaatcgccattcgtcctccggttggttccgccttccgcagccatgaagcaagcattatcggcaacacctgcctgtatggcgcgaccggtggtcgtctgtatgccgcaggccgcgcgggtgaacgtttcggcgtgcgtaactccggtgctatcaccgtggtagaaggcattggcgacaacggttgtgaatatatgacgggtggtatcgtctgcattctgggtaaaaccggcgttaacttcggtgcgggcatgaccggcggtttcgcttacgttctcgatgaaagcggcgatttccgcaaacgcgttaacccggaactggtcgaggtcttaagcgttgacgctctggcgatccatgaagagcatctgcgtggtcttatcaccgagcatgtgcagcataccggctctcagcgcggtgaagagattctggcgaactggagtaccttcgccactaaatttgcgctggttaaaccgaagtccagtgatgtaaaagcactgctgggtcaccgtagtcgtagcgcagctgagttgcgcgtgcaggcgcagtaaggggtagcaacaatgagtcagaatgtttatcaatttatcgacctgcagcgcgttgatccgccaaagaaaccgctgaagatccgcaaaattgagtttgttgaaatttacgagccgttttccgaaggccaggccaaagcgcaggctgaccgctgcctgagctgcggcaacccatactgcgagtggaaatgcccggtacacaactacatcccgaactggctgaagctcgccaacgaggggcgtatttttgaagcggcggaactgagccaccagaccaacaccctgccggaagtttgcggacgagtctgcccgcaagaccgtctgtgcgaaggttcctgcactctgaacgatgagtttggcgcggtgaccatcggcaacattgagcgctatatcaacgataaagcgttcgagatgggctggcgtccggatatgtctggtgtgaaacagaccggtaaaaaagtggcgattatcggcgcaggcccggcaggtctggcgtgtgcggatgtcctgacgcgtaacggcgtaaaagccgttgtcttcgaccgtcatccagaaattggcgggctgctgaccttcggtattccggccttcaagctggaaaaagaggtaatgacgcgtcgccgtgaaatcttcaccggcatgggtattgaattcaaactcaataccgaagtgggccgcgacgtacagctggacgatctgctgagtgattacgatgccgtgttccttggcgtcgggacttatcagagtatgcgcggcgggctggaaaacgaagacgccgatggcgtgtacgcagcgctgccgttcctcatcgccaacaccaaacagttaatgggctttggtgaaacccgcgacgaaccgttcgtcagcatggaaggcaaacgcgtggtggtccttggcggtggcgacactgcgatggactgcgtgcgtacgtccgtgcgccagggagcgaagcacgttacctgtgcctatcgtcgtgatgaagagaacatgccgggttcccgccgcgaagtgaaaaacgcgcgggaagaaggcgtagagttcaaattcaacgtccagccgctgggtattgaagtgaacggtaacggcaaagtcagcggcgtaaaaatggtgcgtaccgaaatgggcgaaccggacgccaaaggccgtcgccgcgcggagatcgttgcaggttccgaacatatcgttccggcagatgcggtgatcatggcgtttggtttccgtccacacaacatggaatggctggcaaaacacagcgtcgagctggatagtcaaggccgcatcatcgccccggaaggcagcgacaacgccttccagaccagcaacccgaaaatctttgctggcggcgatatcgtccgtggttccgatctggtggtgaccgctattgccgaaggtcgtaaggcggcagacggtattatgaactggctggaagtttaagcgaggtaacaatgaattcgccagactgtgtctggcgaatcaaattactgacgaagtgcgcgttgttttctggcaaatgcggcatgagcgtttgacctttcctataatagggataattttcaataaattgtgctttgttcaccaagtctgatgagtgaagcacatcaagcaatttctcatttacaatccgtctcaattacttgttaacacctctgacaataccgattctgcaagctattcagtcttttcattccatgtaaattgtctcgatattaatatacaaaatatgaatataaaaaaccaatatattatccttaattatctatatattttcctatttttcagcgcaaacattcatgtaatgaataattatcaccacaaaccacctcaccagcaccttattattcacatgatcgtaactataaaattcattaaataaatacaccccagcaagttggctatttctgaacgagttatttatttacattcacaaacagatatatatactgcttcagctttttattttaaaaaataaatttgttattaaggatatgttcatatgtttttcaaaaagaacctcacaacagctgctatttgtgcagcactttctgttgcagcattcagtgccatggcaacagatagtactgatacagaattaactatcatcggcgagtatacccctggtgcatgtaccccagttgttacgggcggcggcattgttgactatgggaaacatcataacagtgcgctgaatccgaccggtaaaagtaataaactggttcaactgggccgcaaaaacagcacattaaatataacctgcacagcaccaacgctaattgctgtaacctccaaggataaccgtcagagcaccattgtagcgttaaacgacacatcctatattgaaaaagcttatgatactctcgtagatatgaagggaacgaaaaacgcctttggtttaggttctgcgcctaatggacaaaaaattggcgctgcatccattggtattgacaggtctaatggtgggattcacgcggcggacgatacaggtgaaattcctgtcgacctgattcaaactgaccactggagtgcagcgacccccacatggaaagccagttctaatggcgcattctgcagcctgacaagttgcagtgcaatcgagcgcggttattctgttgcaaaaacaggggaactgacacctgttgctattacagcggtcaccttcccgttactgattgatgctgcggtaaatgacaatactattcttggttctgatgaaacgatcaaactggatggtaacgtcactatcagcgttcagtatttataagaacttgtaatacagtttttatttttacgcattaaccagttagctataactcggacagattatgccctatgacatggtctgtcttaatcaatctcatcgcaaacagtgcataacatatattaacaatatgtttctgcgttatttatcattattacaggagttttaatttaaatgctcagacacattacattcactgtatttataacaacatcaatgaatactaacaatgccggacaggagtactatcaggcattcgttttatacgatcggttaatgtttcaggaaagctcttcgcatatcttggggaaagtaaatgtaatacgctgttcttaattgttcagtgctcaccccccagagtatagctcattccattattcaacttagctccatataaagggacagataatggaaagcctcagtgaaggaaccacagcaggctaccagcaaatccacgacggtattattcatctggtcgatagcgcccggacggaaacggtacgtagcgttaacgcgttaatgaccgcgacgtaccaggaaattggccgacgaattgtcgaatttgaacaaggtggcgaggccagggctgcgtatggtgcgcagctaatcaagcgactaagtaaggatttatgtctaaggtataagcgtgggttctctgcaaaaaacttacgccaaatgaggcttttttacctcttttttcaacatgttgaaattcaccagacaatgtctggcgaattaacaccattgggaattccgcagacaccgtctgcagaattcccaagcgcaaagatttggcagacgctgtctgccaaatctttccccttgcccaggtccacctacgtccgtttactttccgttaaaaacgctgacgcccgcagcttttatgaaaaagagacgctccgctgtggctggtctgttcgccagctagagcggcaaattgcgacccagttttatgagcggacactactgagtcatgacaaaagtgccatgctgcaacaacacgctcctgccgagacgcatattcttccgcaacaggcgatacgcgatccctttgtgctcgaatttctggaattgaaagatgaatatagtgaatccgattttgaggaggcgctgatcaaccacctgatggatttcatgctggaacttggggatgattttgcctttgttggtcggcagcgaaggttacgcattgatgacaactggtttcgtgtcgatctgctgtttttccaccgccgtttacgctgcctgctaatcgtcgatctaaaagtgggcaaattcagctatagcgatgccggacagatgaatatgtatctcaactacgccaaagagcactggacgctaccggatgaaaatccgcccatcggtctggttctctgtgcagagaaaggagccggagaagcgcattatgctctggcaggtttgcctaacaccgttctggcaagcgaatataagatgcaactacctgatgagaaacgactcgcagatgaactcgttcgaacacaggcggtgctagaggaaggctatagacgccgttaatttcagcggtttcgaattctgcagacagtgtctgcagaatctttaaaacgaactaagttttaagccattaaatcagccttaaccttcaccacaacctttttaatctctccaggctcgccgacaacgcatcctggtttatgcggttcacctggcataaacacggcgaacattcccggttttaagatgatggcttgctcgttatcaatggtgctgcaaagctgataatcatcctcatggtggaactcttcacactgacgcgcagtgcctgccatgccaaacagaatccgttcctcaccgtttaataacagctggatatcaatgtattgctcgtgcaattccgcttttttctcgacggggctttgagtgttaaacgtcatgacattcataaagatattgtcgccctgtaattcgtaacgacccggcgctttttcttgcggtctggcagctaatgccagcgttaacgcgtcctgtaacgcaggatgtaacccagcagacggtaaactctgtacttcacccatcatcataatttttctccctgggccaacagcgtagccccaagtaaacctgcatcatggcggtaatgcgccgccagtaaatcaacatgaaatgccgctggctcctgcgccagatacgtttccaccagcgccagatacccttctgccagaccaacgctgccaccgaccaccacgcactggcaatcagttgtggctttaatatcagcgatcagccttgcaagcgtacgtgcggagcggtgaatcagctgctgcgcctgctcgtcaccctgcccggcgcgcgtgaaaatagttttcgcatccgcgccagccaactccccctgcgctgccgctgcaatgccgcgaccagaagcaatcgcttccacgcaacctgtgcgtccacagccgcagactgggccgtgtggatcggcaagcgtatgcccgatatgccccgccagaccgccagggccggtaagcagtttgcagccgctcactacaccgccgccaacgccggtggaaacggtgataaagaccatatcggttatatcgccatccagcgcctgaaactccgcccatgctgcggcctgcgcgtcgttaatggcaatggtcggcaaattggtaagttgttccagcgttttgactaacggaaagtgtagcaatccaccaagattatgcggattaagtgccagcaagctgccgtcacggattatcccggtgctagcgatggcaacccgctgcgcatgagcttgcaacggagagactaatgcggataaggcatcacgcaaggcttctggtgtctggctggctggcgtaggaagttcacgacgatcgcggatctgcccgtcagcgccaatcagcgcggcggcaagtttagtaccgccgatatcaatcgccagtgtggtcatagcaccgcctttttcatcgctgtgttgtaccactgacaaatgtgctcaagacgcgtgattgcagaaccgaccgtcaccgcccacgcgccgtggcgcatcgcatccgccgcctgagcaggcgtgttgtaacgcccttcggcaatcacccgacatccggcgtcgctcaacgttttcaccagcgccagatccggctcttctggcgtttcaggcgtggtatagccagaaagcgtagtgccaataatttcggctcccagcttttggcatgccaggccgtcttccggcgtactgcagtcggtcatcgccagtaaaccgtgatggtgaatacgtgccagcagcgtttcaacaggcaccggacgcgggcggtcggtgccgtcaatggcgataatgtccgcgcccgcctgcgccagcgcatcaacatcttcaatataggccgtgatgcgtaccggagaatcctccagatcgcgtttcacaattccaataatcggcacgctcaccaccgcacgcgtggcttgcagatttgccacaccttcaatgcgaatggcaaccgcgcccgcctgttctgccgctaatgccatggcggcgacgatttcgggtttatcgagcgggctgtccggaaccggctggcaggagacaatcaggccaccgttagcagcgattttttgatccagttgtgcaagtaagctcatacatcttcccttagcgaaaggcccggtacatagaccgggcaacaggattaacttttggttttgactaaatcgtttttggcgctgccaaacggcacggcaccgctgaatggtttaccgtcgatagcgtcatgagtacgcaacgcttccgggcgcaaccaacgctgaacgcgagaaggcatatccagcccaatcagcaggatcaccacgaacgtcagactgaagctgaggcttgccagcgcagtacccagatccagacgttgagcgatcaacgcgccgatgattggggccagtgcaccgcccaatgcgccaacgttgtaggtaaagcccaggcccgctgcacgctggtcggtatcgaaataaccgccaatcagttttggtaagatcccggcgatcccttgtccaagcatttgctggaagaacagtaacagaccgagcacccagacgtttgcgccgccaatcgcaaataccggaataatcagcagctggctggccagcaggctacaaacgtacgctttgcgggttcccagccagtcaccgaggaagccacctacgcagcatcccaccgccgcgccaaagccactaaagaacagcacattggctacagtatgcgggttataagccagatcggttttcagatacgttggcagcagcgcctgaatcggccaactgtagaggaaagcaaacaacacgaccaccatcagcattacgcccgttggccagcgtttgcctgcactctgcaccataaagctgataaagattgcggcgcataacagcccaagaacagcgacgatcgcggcattttgcaggttaccggcgaagcagaaccacagcgcagtagccgccgccagtgtcattacgatattggcaatgcgatgttcaccacggtagagaatatccaccattgtgcgtactggtgctttacctgcgtgtttctctttccagtcttccgcttccgggatgtttttacgcagccagagagcaaagatgattggcaaaatgccgataaagaacagcgcacgccagccccagaccggaaccaccaggctatagacctgagcggcaacgacggcccccacagagaagccactaatcaaaaaaccactggctttgttacgcagatgttttggccagctttcaatgacataggtggcgctggaaccgtattcacccgccatccccatgccgatgaccagacgagcgataaacatggtgatgtagcctggcgcaaagccgcaggccagcgtcccggcgctgaagagaacgatgctggtgaccattgccagacgacgcccgtagcggtcacccatagcgccgagcatcaggccgccgaaccagcgagagataaaggctgcagagatcagacttgccgcctgcaccgtcgtcagcccgaattcaccttgtacttcggtgagtaccagggcgattaaaacgaaatcaaaaccgtcaagcagatatcccaaccaggcagcggaaaatgcgcgccattgtgcacggttgagatggcgataccacgggatattctgggttgtagtactcattgtgagtctcccgcggtgggcgatgcccacacgctttggtatgaaaattgtagggtacagatgcgtttatttcccctcacccggtaggggcgagcgaggggaaacaactcacccgcgctcttgcatcaactgctgggccagcgccttcagttctggcagatatttttcatctaccggtccaaacggtttgcggcacagcggcacagaaacgacatccatataatggaggacagttttcaggccgcggaatacgcccgttttgatcagtaaatcaatgactttattgcattcagtttgcagtttctgcgcggtctggatatcgccttctttcagcgccttaacgatcccctgatagcgccagcccatgatgttgtaggtactgccgataccaccatcagcgcccgccagcagaccagaggcgaagatttcgtcgtaaccgttatagagcacaagatcaggatgttcacgacggatctgctccatctgatagagatcgccagaggtctgtttcagcgcacctacgccaggcaatgtaacaagtgtgttgatctgatccagggtcagttttaccccactcagggctggaatgttgtacaccaccatcggcaaaccatccgcgctatcaataattgcccgatagtgatcgcagtgttcttcaaagctgaaaggatagtagaacggcgtgacggcggagacggcatcgaagccataacgtttagcgcttgccgcaagttgttggctttcggcggtgctgacgcaaccgacgtgggcgatgagtttaatcttacctttcgcctcttcggcgacgatttccagtacctgttcacgctcggaaaggctttgtacaaaggcctcgccggtgctaccacccacgtataaaccgtcgatgccctgctgaatattgaactgaaccaggcgacgcagactcgctttatccagtgcttgttgttggtcaaaaggagtcaggagtgcagccattacgccacgtaaattcgttgccataaatacctctgaagtgatgcttgtctgataaacgatatacctttatacctgttataccagatcaattaagcaacaccccatacagaaagcttataatgcgatctgcttcactaaagtggcattatttctttttgttggtggtctgaccgaaagcgtgccaggtagcagagacgctgttgagatggctttgcaacgcacgatcggcttcgtcaggatcatgacggcggatcgcatcaacgatcgcaatatgctgttgataactaacgttgttatgttcgtgcagtgcctgatcggtaaccgttgggcgtgcggcaataagccagtcgagcagggcaacgtggatcgccatgaagattgggttaccggggatctccgccagcacgcggtggaaatcaacgtcactacgaatgaatgccgcgttgttatccaggctctgactgttgatttccagtgcttttgccagcaaatcgatttgctcatcggtggcatgttcagccgcatagcgcaccagactggattcaaagaacagacgtaattgttcgaaatgggcaatcccaccgggatgagaaaggaaatctttcgccatgccggaaagctcaccgatgatagtgtccgcagaaggacggctgacgcgagcgcgttcgccgttgtttatttgcaccagacctttgcgttttaacgctgccagcgcttcacgcacgctaggacgcccgacgttaaagaacgccatcagttcgcgttcagacggtaattgttcaccttcgccaaattcacgacggcggatcatctgttccagctcttcttccaccatttcggagagttttttacgcgccagcgggcggctacgcaagttgcgaccaattgcaggactagaatcttcggtttggctatcaaatgcgttcataaggcccattctgtaaggtcagtgtgattaacatcatcagtgacatcctatcacaggattgaaagtaggggaaaatggcagggttttctctttgtgcctcatcattaccataattaacggaataattaactattgcgaaaaattaatgtaacgcagataaaaacatcccgtttgaattatttataagactattcacgagcattatgaatattatgaatgtgttcttacaaaataatcataagcgcatattttttaatgaaaaatcacctcacctacaattaaaaacacgacatccgcaccataaatagccttgcaaaaaatataacatcgttgttttcaatctgccgtttatgggattgaccgttttcttttgacacggagttcaacaatgttcggcataattatatctgtcatcgtattaattacgatgggctatttgatcctgaaaaactacaaacctcaggtggtgctggctgccgcaggtatcttcctgatgatgtgcggtgtctggttagggttcggtggtgtactcgatcccaccaaaagcagcggctacttgatcgtcgatatttataatgaaatcctgcgcatgctgtccaaccgcattgccggattggggctgagcattatggcggtgggcggttatgcccgctacatggagcgcataggggccagtcgcgcgatggtgagcttgttaagccgcccgttaaaactcattcgcagcccgtatattattctgagcgcaacttacgtcatcggccaaatcatggcgcagtttattaccagcgcctccggtctgggtatgttgctgatggtcaccttatttccgacgctggtgagtctgggagtaagtcgtctctctgcggtggcagttatcgcaaccacgatgtccattgagtgggggattctggaaacgaactccatttttgctgcccaggtagcgggaatgaaaattgccacatacttcttccactaccagcttccggtcgcctcttgcgtcattatcagcgtggcgatctcccactttttcgtgcaacgcgcttttgacaaaaaagataaaaatatcaatcacgaacaggcagagcaaaaagctctcgataatgtcccgccgctctattacgccattttacctgtgatgccgttaatcctgatgctcggcagcctgttcctcgcccacgtcgggctgatgcagagtgaactgcatctggtggtggtgatgttactgagtttgactgtgacgatgtttgttgagttcttccgcaagcataacttgcgcgaaacaatggacgatgtgcaggcgttttttgacggcatgggtacgcagtttgccaacgtggtaacgctggtggtcgcgggtgaaatatttgcgaaaggcttaacgacgattggcactgtcgatgcggttatcaggggggcggagcattctggtctgggcggtattggcgtgatgattattatggcgctggtcattgccatttgtgccattgtgatgggctctggcaatgcgccgtttatgagttttgccagtcttattccgaatatcgcagccggactacatgtaccagcggttgtaatgattatgccgatgcattttgccacgacgctagcgcgcgcggttagcccgattactgcggtggtggtcgttacgagtggaattgcaggcgttagcccttttgcggtggtgaagcggacagcgatccccatggcagtcggtttcgtggtgaatatgattgccacaatcacgctattttattaagtcattaaaaagacaaaacaggccgcctgggcctgttttgtattacttcacaacgcgtaatgccggtcgaccaccgcgtggtggctgcggaggttcatcgtcaggatgagtgtcatcatcgtgatctggcttgtcgccatcaataacgctcataacggtttcgttgtctgcgcttgcctcttcatcattcatgatgctggtatcttcatcgtaggcagcttcaggctcaaacatcgtgcctgcgccattttcacgggcgtagatagccagcacggcagccagcggcacagaaacctgacgcggaatgccaccaaagcgcgcgttaaagcgcacctcatcattcgccagttccagattgccgacagcacgcggcgcaatgttgagtacgatttgcccgtcacgcgcatattccataggaacctgcacgccagggagcgtcacatccaccaccaggtgcggcgtgagctggttatccagcaaccactcatagaatgcacgcagcagatagggacgacgtggtgttagctgactcaaatccatacagattaactccggcccagacgcatttcacgttctgcttcagttaaagaagcaaggaaagagtcacgctcaaagacgcgggtcatatagcctttcagctctttcgcacccgggccgctgaactcgatgcccagttgcggcagacgccacagcagcggagcaagatagcaatcgaccaggctgaactcatcgctcaggaagtacggcttctgaccgaagaccggcgcaatcgccagcagttcttcgcgcagttgcttacgtgcggcatctgcttcagaagcactaccgttgatgatggtgttcatcagcgtgtaccagtctttttcgatgcgatgcatgtacagacggctttcaccgcgagctaccgggtaaacaggcatcagtggcggatgcgggaaacgctcatccagatattccataatgatgcgagattcccacagggtcagctcacgatccaccagggtcggaacgctctgattcgggttgaggtcaatcagatcctgaggcggattgtccttttccacgtgttcgatctcgaaacttacacctttctcagccagcacaatgcggacctgatggctatagatgtcagtaggaccggaaaacagcgtcattacgctacgtttgttggcagcgacagccatgaaaacctccaggtatagtcagaatttttactgctaccagccaccaggtggccagtcagaagttgtgttacccaataaggaacgactctctttgttcgaaaatcaaacaaaaaatgagcaatacccgacatttgggcagaaaattggatgatagtttaccagattttgcgaccattgtggtgagtcgatgccggaaatggggaaaaagagatgcgctttagtctgaaatagttgacttagtcccttattggcgatgtggtttttgttttacctgtctgtcaggtggcagcaaaaagcaactttccagtttttacgctgattcagattttagctataaaaaaacccgccgaagcgggttttttcgaaaattgttttctgccggagcagaagccaattaacgtttggagaactgcggacgacgacgtgctttacgcagaccgactttcttacgttcaacctgacgagcgtcacgagtaacgaagccagctttacgcagttcagaacgcagggactcgtcgtattccatcagagcgcgggtgataccgtgacggatcgcaccagcctgaccagagataccaccacctttaacggtgatgtacaggtccagtttctcaaccatgtcgaccagttccagcggctgacgaactaccatgcgggcagtttcacgaccgaagtactgttccagagaacgttggttgattacgattttaccgttgcccggtttgatgaaaacgcgagctgcggaacttttgcggcgaccagtgccgtagtattgattttcagccattgcctataatcccgattagatgtcaagaacttgcggttgctgtgccgcgtggttgtgctcgttacccgcgtaaactttcagtttacggaacatagcacgacccagcgggccttttggcaacatgcctttaaccgcgatttcaatcacacgctcaggacggcgagcaatcatctcttcaaaggtcgcttgtttgataccaccgatgtggccggtgtggtgatagtacactttgtcagtacgcttgttgccggttacagcaactttgtcagcgttcagaacgatgatgtaatcaccggtatctacgtgcggagtgtattccgctttgtgcttaccgcgcaggcgacgagccagttcagtagccagacggcccagagttttaccggtcgcgtcaacaacataccagtcgcgttttacggtttctggtttagctgtaaaagttttcattaaaagcttacccaataaatagttacacgttggtgaacacccaaacgtcttcaattgttgaggttcacacgacaaagtccggcaaacctaccccttcgaatagcctatgccagcacacaaaaagttttgggaaaaaaactttcttgtaacgtggggtcgcaggattatagagaagtcggggtcaaagatcgacccctttttgtgatttgtgacaggttttaacccgccaaatgctcgcgcttcagatactcttcgctttgcatctcttgcagacgactcaggcaacgctggaactcaaacttcagccgatcgccctgataaatttcatacagcggcacttctgcactcaccactaatttgacatggcgctcgtaaaactcatccaccagcgcaataaagcgccgcgcttcgctctccatcaaccgcgtcataactggtacatcaaacaacatgaccgtatgaaagagacgactgagcgcaatatagtcatgctgactgcgggcgtcgacgcacagcgtagtaaaagagaccgccagcgtctggttctcgacgcccattgttgctaatggccgatggttgatttctaacgtcggactattttctcgtttcccccccgccagcgccaaccatagtttatccatttgcgcccgggtttcatcgtgaagtgggctaagccacagatgcgcctgagtgagtgtacgcagacgataatcaacaccagcgtccacgttcattacatcacaatgctgtttaatggcatcgattgcaggcagaaaacgcgcacgttgcaggccatttcgataaagttcatccggcggaatattactcgtcgctaccagggtaataccgcgagcgaacagggctttcatcagaccgccaagtagcatggcatcggtaatatcagaaacaaaaaattcgtcaaaacagagcacgtcagtttcggctttaaagcgatcggcaataatttccagcggatcggtctgcccctgtaaggcagttagctcttcatgcacccgcagcataaaacggtgaaagtgcaggcgctgtttccgctctcccggcaggctttgatagaaaaggtccatcagccaggttttcccgcgtcctacaccgccccacatatataagccacgcactggcgtatgctttgtgtcttcgcgtttaccccacagcttaccgacccgcgccattagcccactcgtcctgggggctggtggcgtgctattgatgagttcctgataaataatttccaggcggctgacggcctctttttgaacgtcgtcgggttgatggctgccttcattaagcgccttcaggtattggcttgttggggtaacgctttgcatgatcttattgttattccttgaataatcggtgcgccgttgttcacggttgacgaaaaaaaggccgttctacactacgcgatatgcagtcgggattccacttctgtggaattaacggttatagtggcataatcagccgcaggcatggagcctgaagccaacaccctacggaaacaaaagacaacgggagatgttcatgacctgggaatatgcgctaattgggttagtcgtcggcatcattattggtgctgtggccatgcgttttggtaatcgtaaactacgccagcaacaggcgttgcagtacgaactggaaaagaataaagctgaactggacgagtatcgcgaagagctggttagccactttgcccgcagcgcggaattactggataccatggcgcacgactatcgccagctgtatcagcacatggcaaaaagctccagcagcctgctgccggaactgtctgctgaagcaaacccgttccgtaatcgtctggcagagtctgaagccagcaacgatcaggcaccggtgcagatgcctcgcgactattctgaaggcgcatccggcctgctgcgtactggcgcgaagcgcgactaatttatttttcgggcgcagccattgcgccctcctcttctctccctccccgactatcatttaatctggtgtctcattgttagccgtctgaaaattcaataacatcaaactgttttgaatctcttttcttatcattcaggtacgagagcaggaataatgaaaaaacaaacccagctgttgagtgcattagcgttaagtgtcgggttaactctcagcgcgagttttcaggccgtcgcgagcattccaggccaggttgccgatcaggcccctctccccagtctggctccaatgctggaaaaagtgcttccggcagtggtgagcgtacgggtggaaggaacggccagtcagggacagaaaatcccggaagaattcaaaaagttttttggtgatgatttaccggatcaacctgcacaacccttcgaaggtttaggctccggtgtcatcatcaacgccagtaaaggctatgtgctgaccaacaaccatgtgattaatcaggcacagaaaatcagtattcagctcaatgatgggcgcgagtttgatgcaaaactgattggtagcgatgaccagagcgatatcgccctgttacaaattcaaaacccgagcaaattaacgcaaatcgctattgccgactccgataaattgcgcgtcggtgattttgccgtagcggtcggtaacccatttggccttgggcaaaccgccacctctggcattgtttccgcattaggccgcagcgggttgaatcttgaaggtctggaaaactttatccagacagatgcttccattaaccgcggtaactccggcggtgcactattaaaccttaacggtgagttaattggcatcaacactgcaatccttgcgcctggcggcgggagcgtcgggattggatttgccatccccagtaatatggcgcgaacactggcgcagcagcttatcgactttggtgaaatcaaacgcggtttgttaggcatcaaaggcaccgagatgagtgccgatatcgccaaagccttcaaccttgacgtgcagcgtggcgcgtttgtcagcgaagtgttgccaggttctggcagcgcaaaagcgggcgtcaaagcgggcgatattattaccagcctcaacggcaaaccgctgaatagctttgctgagttgcgctctcgtatcgcgaccaccgagccgggcacgaaagtgaagcttggcctgctgcgtaacggcaaaccactggaagtagaagtgacgctcgataccagcacctctagcagcgccagcgctgaaatgatcacgccagcgctggaaggtgcaacgttgagcgatggtcagctaaaagatggcggcaaaggtattaaaatcgatgaagttgtcaaaggaagcccagctgctcaggctggcttgcaaaaagacgatgtgatcattggcgtcaaccgcgatcgggtgaacagcattgctgaaatgcgtaaagtgctggcggcaaaaccggccatcatcgccctgcaaattgtacgcggcaatgaaagcatctatctgctgatgcgttaatgtcgtaaaccgggcatcaggcttacgtgtgatgtccggttaactcgtggtatgctgctgccgttcccttttttaatgacgcctccatcatgtttgtgaagctcttacgttccgttgcgattggattaattgtcggcgctattctgctggttgccatgcctagcctgcgcagccttaacccgctttccactccgcaatttgacagtaccgatgagacgcctgccagctataatctggcggttcgccgcgccgcgccagcggtggttaacgtttacaaccgtggtttgaacaccaactctcacaaccagcttgagatccgcaccctgggatccggtgtaatcatggatcaacgcggttatatcatcaccaataaacacgtcatcaacgacgccgatcagatcatcgtcgccttacaggatggacgtgtatttgaagcattgctggtgggatctgactctctaaccgatctggcggtacttaaaattaatgccactggcggtttacctaccattccaattaatgcacgtcgcgtaccgcacattggcgacgtagtactggcgatcggtaacccgtacaacctcgggcagaccattacccaggggattattagtgccacgggtcgaatcggtctgaacccgaccgggcggcaaaacttcctccaaaccgatgcttccattaaccacggtaactctggcggcgcgctggtgaacagcctgggcgaactgatgggcattaatacgctgagctttgataagagtaacgatggcgaaacgccggaaggtatcggctttgcgattcctttccagttagcaaccaaaattatggataagctgatccgcgatggtcgcgtgatccgcggctacattggtatcggcggacgtgagatcgcaccactgcacgcgcagggcggtggtatagatcaactgcaagggatcgtggttaatgaagtgagtcctgacggcccggcggcgaatgcgggtattcaggtcaacgatctgattattagcgtggataacaaaccggccatctctgctctggagacgatggatcaggtggcggaaattcgccctggtagcgtgatccctgtagtagtgatgcgtgatgataagcagttaacgctgcaggtcaccattcaggaatatccggcaaccaattaagtcgtgcgctcaaaacaaaaaaccggagtctgtgctccggttttttattatccgctaatcaattacttattaacgaactcttcgcccagggcgatatctttcttcagcgtatccagcataccttccagcgcgttctgttcaaatgcgctcagggtaccgatagatttacgctcttccacgccgtttttacccagcagcagcggttgagagaagaaacgggcgtactgaccgtcgccttcaacgtaggcacattcgacaacgccttgttcgccctgcagtgcacgaaccagagacagaccaaaacgtgcagctgcctggcccatagacagggttgcagacccgccaccggccttcgcttcaaccacttcagtacccgcgttctggatgcgtttggtcagatcagccacttcctgctcggtaaaactaacgccaggaacctgactcagcagcggcagaatggtaacaccagagtgaccgccaataaccggcacttcaacttcgcctggctgtttgcctttcagttccgcaacaaaggtgttggaacgaatgatatccagcgtggtaacgccgaacagtttgtttttgtcataaacaccggcttttttcagcacttcagcagcaattgcaactgtggtgttaaccgggttagtgataataccaatgcacgctttcgggcaggttttcgcaacttgctgtaccaggtttttcacgatgccggcgttaacgttaaacaggtcggaacgatccatacccggtttacgcgctacgcctgcagagataagaacgacatctgcgccttccagcgccggagtcgcatcttcaccagaaaaacctttgattttcacagcagtagggatatggctcagatcgacagccacaccgggagtcactggagcgatatcatacagagagagttcactaccactaggcagttgggtttttaacagtagtgcaagcgcctggccaataccgccagcagcgccgaggactgcgactttcatcctaaactccttattatattgataaactaagatatgttgctccgctgccgcgaccttaatccacaaaattgccgtttacaatgaccacatctcaagaatgtgtagtcacgcaagtttagcgtttatgcatttaattgccgtaatcaggaacctaacttacgtaattaacagtcgcttatgcattagcgcaacattccaacaggtggtgacaatataccctaccgttcagccaaaacaacatcaatttgataacaattaatttacttttaagcagaatttgcatgccgtgacgcaggcatgtttctcaataacgaaatttgataaaatcccgctctttcataacattatttcagccttcttcagggctgactgtttgcataaaaattcatctgtatgcacaataatgttgtatcaaccaccatatcgggtgacttatgcgaagcagcgctaagcaagaagaactagttaaagcatttaaagcattacttaaagaagagaaatttagctcccagggcgaaatcgtcgccgcgttgcaggagcaaggctttgacaatattaatcagtctaaagtcagccggatgttgaccaagtttggtgctgtacgtacacgcaatgccaaaatggaaatggtttactgcctgccagctgaactgggtgtaccaaccacctccagtccattgaagaatctggtgctggatatcgactacaacgatgcagttgtcgtgattcataccagccctggcgcggcgcagttaattgctcgcctgctggacagtctgggcaaagcagaaggtattctgggcaccatcgctggcgatgacaccatctttaccacccctgctaacggtttcacagtcaaagacctgtacgaagcgattttagagctgttcgaccaggagctttaatctctgccccgtcgtttctgacggcggggaaaatgttgcttatccctctcaaccccctgctttcccctgcgattaatttaacgaatagtgcgttttactgcgacatgtcattcacacaatgaatacataaggtaaaaaaagcacattatgcaaaattcattatctaattgaaaaaactagaattaacgataaataaccgtatttttaattcttttttgttattaaaattcacatttttaacacttagtatcaactgaaacagttagcgcggtattaattagctcaataattagtgtatacttgattttgtgatatgggtcacgaaacaaaggcccagctaaaagattatgtcgaggtaaaaatcatgaaaatcaaaaccactgttgctgcattaagcgtactttctgttctctctttcggtgcattcgctgccgactccattgatgctgcacaagcacaaaatcgtgaagcaatcgggaccgtatccgtaagtggtgtggcgtctagcccaatggatatgcgtgaaatgctgaacaaaaaagcggaagagaaaggcgcaacggcctaccagattactgaagctcgtagcggtgacacctggcacgctacggctgaactgtacaaataaaccctcatcgtcttgtccgacgatattgcccccggttcgggggcttttttttgcgttaatgacgaacattaaaacgcaaatgcccttccagctcttcctctgcctcatcaaacagcaatattaacgcgccaaaacggcgacgcgttttctctcccagatgaacaaattcaatctcaagtggtagcggcaggacatcgttcattaacacatcccatagactgtcgagatcgcgtaccttatctttcgccagaccaaaggtttggctaaagtcacgataaaaatcctcctgactctcaatctcatcaaaatcaaaggtataaatattcatctgttgccaccgtcacgtttcgcggcgagttctgccgtgcatcgctaagtatagccatgaaaaaaccgacgcttttggcgtcggttttgacttaactatcggtcaacgcatgttgatacttatggagcatccccgccagccgatttaccggttccgtcacctgcggtggcgcttgccagatgcgtagcttttcctggtagatttccagttcttccagcaactggccaaagtaccgacgacgtttatcatcgctacgggcagatatcacatggtctgctgtgcggcgcatttgtcggtgaaacgcgcttaaatcctcgttaaccgggatcggtgcatcacgcaggcgctggtgcgcgataatcatcgtcagcgccaggcgaaatttcggcaaatcccctgggaacttattcatcagcaaaaacagctgctgataaagtgccgggaggtggttctctttacgacgtgccacattggtagtcatcgcggaaacagcggcagaaacaaactgattaagcagtacacgtccggtcctgtcgcggcttttatcccgcaccagcaaaataacggtgaacgcgagcacacagccgacgatttgccctaatgcgctgtcgagaaactgactgaaatggaaagtcatcgggttatccagcacgataatatttatggtgctggccagtgcccccatgctgcccagtcgccgtttctgtacttctataccgaggaagaatcccagcactgccaggctaatgcacagcagcaacatgctctgttgggtattagggataatcaccaaaaagtagagcagccctaacggcagcgcggccagcgtcccgtagataaagtcgatcgccaccatgcgtggattcggcaaacgcattgccagactcgtcactaccgcaatcatcaccattgcaccactgccggaagtccagcccgtccacagccagaaaagcgtgcccagaatgcaggaaagtgtggttcgccagaagttacccattgcatgatgacgttcggcactctctacttttacttccggttcgccttgcaggatctcttcttcggtggcgttgatttttgtgttactgataacgccgcgcttgagaagctgataacgcgttgccgccgcgacccagctataaatggtgacaggcgtttcccgttccccggtccaggcgataactctccgcaggcgtttgagctgcttgtggacgtcctgcgcggtttctaccggcgtgtcaaaaaattcgcggaaagtatcagtgatcaattccgggcgcgtattctgaataagataagtttcgcaggattgggtaatcagcgtcaggcttagcgtattgatcgcttttaaacgtcgattggcccgcgcccagcgggaagattccatattcaggttgctgcgcatgccttgtagcgccgtggtgcgtcgcaccaggtcgccccaggctttatcgacaacttcaccatcgccatgcttgatacagagttgcattaattgatattgcgcgaccagcaaactttccagctctcgatccacttcttgtttgatgcttcgcggagaaaagagcaaatccgccataatcgcacacacaataccgataacgatctcgctacaacgttcgacggcaaactgcggcgtaagcaatggttccggctgaatggtgatcacaatgatcagcgcggtataaccggccagcccccacgcatagctgttttctattcgtaccaggctggatatccaggtacaaaaaccggcccagatacagcacaccagaatcatcaataatggtgcgcggatcatcgcaatgatgatcaccagtccggcaatacagccaataaatgtgccgatgatgcgcaaaaagccacgatagcgaatagcgccagaatacggttcacctcccgcagcaaaggccgtaccggcggcaacaatcgccgctgtcagtaccgcccagcgtggcgtttccagctggaagtgaaagccaacaaacagcgccagtacaatggcggtcgccagttttaccgcaaagcgaatatgttggttagcaatggagaaaatacccatcgtgattaaccaaactcacgcaggcgatgggccattttacggaagaagctatcctggctttcgtcgcgatcttgtttgccagtgaccaccactgtagcagtggtgcccgcaggccagatgttctcttgctggttgtcgagacgaatacgaaccggaacacgttgcgcaagacgcacccattcaaggttagagtctatagtcgccatccctttgtcgtcacgcgtgctgctggcgttggtgacccctgcggcaacactatcaacagtccctttcagcactttgttactgccaagcggcgtgatctctgcacgataccccggacgcaccccttccagcttagtttcttccatataggccagtacatagaaggagttctgtttcaccagcgcaaccgccgtacttcctcgagtaataaactcaccggtatagacgttgaggttggtcacccagccatctgctggcgcgcggatcaccgtgcgttcaagatccagttttgccagatcgcgggtcgcctgcgctttcgctaactgatgcagaaccgtttgtagtacgttgttggcctggtcgatctcttcgcgagacatcgcctgcacaccgagacggttacgacgtccggcctcctggcgtttctcctgtgccagtacctgataataagcaacatcggcttgcgcttcctcaagcgccttttgatagcgcggctggtcgatggtgaacagtatctgtccttttttcaccagctggttatcatgaacattcacctgggtaatgagtccagaaacgtccggcgcgatcgcaacgacgtcagcgctaaagcgcgcgtcacgcgtccagggggattcggtgtaatagacccaggcattaaaaattgcgatgaaggccagaatgactaatacgaccgtgatggccgtacgggagaattttcttattagtgttttcacttcaacctcaaacgaacagtcggcttatcaaataaaacaagcagcaatagagcgcggtgttgaacaacgccggatgccagacaaagtcgtagatacctgttggcacaagtacccggcgcaccagccagaaaatcgccagacttaaaagcaattcaaaaaatatcggtgggaaggacagcccaaacaccacgataacgggaaacagactcatgttgaccttggttgtaaagagagagcaggcgttattattttcagcatctgtcgccgcagagaagggcatggaaagccgggcgagagcaacattgctgtagattgatatttaatatattagcgtaactgttatgctgttatctatattatgtgatctaaatcacttttaagtcagagtgaataatggaacgactaaaacgcatgagcgtgtttgccaaagtagttgaatttggctcttttaccgccgccgccagacagctacagatgagcgttagctccatcagtcagacggtaagtaaactggaagatgagttgcaggtaaagctgttaaaccgtagcacacgcagcattggcctgaccgaagccggtagaatttactaccagggctgccgtcgtatgcttcatgaagtgcaggatgttcatgagcaactgtatgccttcaataacacccccatcgggacgctacgcattggctgttctagtactatggcacaaaatgttctcgccgggctgacagccaaaatgctgaaagaatacccaggtttgagcgtcaatctggttaccggaattccagcccccgacctgattgccgacggtctggatgtggtgatccgcgtcggcgcgttgcaggattccagcctgttttcccgccgtctgggcgcgatgccaatggtggtgtgcgccgcgaaaagctatctcacacaatacggcataccggaaaaacccgccgatttgagtagtcatagttggcttgaatacagcgtgcggcccgacaatgaatttgaactgatcgcaccggaagggatcagcactcgcctgatcccacaaggaagatttgtgactaatgatccgatgacgctggtgcgctggctgacggcgggtgccgggatcgcctacgtgccgctgatgtgggtgatcaacgagatcaatcgtggggagctggagatcctgctgccgcgttaccagagtgatccacgcccggtttatgcgttatataccgaaaaagataagctgccgctgaaggtacaggtcgtgatcaacagcctgacggattattttgttgaggtcggtaaattgtttcaggagatgcacgggcgcgggaaagagaagtaattcatattgtactgttacgttgtacaaacctgtgccaacgggttcccctcaccctaaccctcaccccaaaggggcgaggggaccgttcgtgcacgtagaaagattaattatccttctgaaaatagtgaaattattacgcagtaccgccaacagtcaggttatcgactttcaacgttggctggcccacgccaaccggcaaactttgcccttctttaccgcagacacccacgccgttatccagtttcaggtcgttgccaaccatgctaatctgctgcatggtttcgataccggaaccaatcaacgttgcgcctttcaccggcttcgttactttaccgttttcaatcagatatgcttcactagtggagaaaacgaatttgccggaggtgatatccacctgaccgccaccaaagttcggtgcatagataccgtactcaacggattcaataatttcctgcggggtgcttttacccggcagcatataggtgttggtcatacgcggcatgggcagatgggcgtaggattcacggcgaccgttgccagtcggcgtcatccccatcaaacgcgcgttgagtttatcctgcatgtagcctttcagaatgccgttctcaatcagcacgttgtactggcctggcgtaccttcgtcatcaatcgccacgctacctcggcgatcgaccatcgtgccatcatcaaccacggtacacagttcactagccaccagctccccgacctgtccactaaatacactagtgccacggcggttgaagtcgccttccagaccgtgaccaaccgcttcatgcaacagcacgcccggccaacctgcgccaagtactaccggcatggtgcccgctggtgcagcaacggcagaaagattgaccagcgccatacgcactgcttcttttgcccatgcatccgcacggacttcgccgtcgagatcggcaaggaagaattcataaccaaaacgaccgccgccgccactggcaccgcgttcgcgtttgccatcttcttcgacgagaacgctcacggaaagacgcaccagcggacggacatccgccgctagcgtgccgtcggtggccgcaaccaaaattaattcatagacaccactgaggctggcagtcacttcctgtacgcgcttgtccgcttcgcgggcaaccttatcgacgcgacgcaggatatccagcttctcttcacggctcatgctttgcagcggatctacgctggtatacaacgggctatgctctaccgcgcccagcgtctgtactttaccatcaccactatcacggacgatggtgcgcgccgcttgcgcactctgttccagcgccagcaggctgatttggtcagcgtaagcaaatccggttttttcaccgctgattgcacgcacaccaacgccctgatcgatgttgtaagaaccatctttaataatgcggtcttctaaaacccaggattcgtgatagctgctctgaaaatagagatcgccataatcaaggcgacgttcggccagttgaccgaggatcgcgaacaagtcctgatgtttcaggccgttcgccgctagcaattgttcacttaccaggttaagactcatcgtttttgctactcgttagttactgcagtagaggattttttacggctgccggatgcggcgtgaacgccctatccagcctacggttatgttccggtttgtaggcctgataagacgcacagcgtcgcatcaggcaacggctgtcggatgcggcgtaaacgccttatccgacctacggttatgttccgtttgtaggcctgataagacgcacagcgtcgcatcaggcaacggctgccggatgcggcgtaaacgccttatccgacctacggttatgttccgtttgtaggcctgataagacgcacagcgtcgcatcaggcaacggctgccggatgcggcgtgaacgccctatccgacctacggttatgttctggctcgttggcctttggcaacgattatcctatgagattggggcaattacgcgccctcgtcaaatcattgcgctttttctttacgcggttggcgcaacacttcgttgatttgcggatcgtccagcggaccgctaatgtgatagcgcaaaatggagactttgctccacagcggccccagcactttactggcggcaaacactgccgcgccaacaatggggttaaccgcaaaagccgcagccacgcccaccgtcgcagaaatctctggtgcgacaaccgcttccatattcaggtcgcgacgtaccagatttacgctccctttcatggcgatatccgcctccaggccatccaccagcgtgtcgtcggtgtgcataacgccgtctttaatccacgcggtgctgcgaatggagtcaaaatagaacccttcgccaaaagtgtctctgaaatcaaaacgcagcttacgcatcagggcatctacgctcaataagcgcagcaattgcccggcatgtccggtattgatttcggtaatttcgcctttacccagttgagtatgaatgatgccattcaacgtcgcttcatctggctgccagggtgctttgcgccagtgtaaatcgtaatccacattaaaactgctctggcgtatgggcgtcgtgacaccaaaaaattctgcggcggcatcaattttctgcccgcgcagttttcctttcaggctggtacgttcattccccggattattaacccattcaccatcggcagtaagccggctgaaaccagtatcaatcagtccattggtcagcgttaacgtatcgccagaaatggtgatatcactgtcaatgcgaccgaatttttgcccccagaaccagcactctgtgcatcgtatttgggcgtccggccagccacggaagttaatgcgctccgttgtcgggaaaggactactcggcgtactatcaccacgagttttcgccacgctcgggttgtaataaagatatttgatattcgccagccacggcgcgttattacgcatcgctagcgtggcgttgatttcacgcccttgcgcttcaaccagggtgccatttgccgtcggttggctaacaatactcaggttattccattgctgatttcccagactcaacataggcgtacgtaacgttatgtgttgtgggaaactcgctgcaccaccgacactctccgcagcgcctttctggaacagggccagccactcggcaccattcatcggcggcatattgagttcaacgccactttgttccggcaacggcgggagcgttttactgtctgccgcccaaatagcacgatcgagcgtcagcttttgaccgagcaaccagcggctattgaaatgattatccgcaccagcctgtccggttaattcaaagctgttgagattgccatcaaccttaacgtttaccgctagtggttcacccgcaggtttggctaacggactaggtaagtgactgctcacattctttagatcgccgttcagctctatgttataggtcgcaccagcatgataaggcagatcaatgcccactttaccatcccacgccacgctgccactcaatgcttcgttcaccgcttcaggcagaacgccggttttcgccggttgccagttaccgttgaggtttaccgctacctggtaggcttttgccccttctttggtggaaaaatccacgttcaacggctgattaaaccagcttgctgtcagtggttcactttgcagatcgctattgataaagctgaatttaccgctcaaatttttcagggtgctgtcgagtggtttgataaacagactgttattacgcagcgtcacttcacctttcgcggttaccagttcgccgttcagcgggatatcaagatgtaagcgagcattcacatcgccgtcgagctggagttcttgcagggtcgcacccagagaatctttcagcggtgtctcatcaaagtaagggccaacggctttacccggacctttaatgtcagcgtcaatcagcagtttttctttactgtagtcagggatcactgcggtaagattactcgcgcgcacgccgcccagattaacgccatcggttttcatccataaaccgtcgttaataaagtccagttcaatatcaaggttagttaatgcaggccagtccggctggaaggcaaacttcgcgttgcgcagcggcaccagcacttcaaactgaccttcgttgtgtttataggggaagagttgcggattgccaccataaaccagcgtcgcgttatccgcttcaccgccctgaatcgcgccacttaagtaatcaaccaggtctttacccatcaagttttccgggaaatagcgccaggcttgactaccatcatcggtactgatgccagccagaatacccagccagggttcatcgttagcaggttgcaggtaacgaaaaccgccgcgcgcatggacggctttggctttaacgtcaatattacgcccatccagctggaaacctttgttattgttcagccagcttatagttgcctggccgtcggcgatttctagtggcgcacggaataccgtttcgtaaggcatctttgcctgcttcatgctcgcggtaagcaaaccattttcaacgctgccggaaagcgtcccggagaagtgttccgcacccggtaataatttccattgcttccaggccagatcgctccagcttgcctgaaaacgggtcttgtctgccgcctgaagcgggatatccagcgccagagtgttaatcttgccgctcggttgtgtggagcgccaaacatcacccagtgcaggactaagtttcgcggccagcgggcgtatgccctccaggcctgccagctccagattactggcgcgaatccggagttcgtcactgcgtttattgtctttgccgccaacgtcctgttccggtatccaggccagcgtcaatgctccgctcggccagggtttgccgtccatcgtgatccgtgtatcgggaatagagaactgccagcccggattttcacgcgtaatatgcgcggtcagattatccacgctcagcgtatgcgtttgcttctcgcccaaccagctggcaccgccctgtttcagccagacgtcaccgccggttacatcgcctttgtcgatcgtcatccagccttcaagggagaactgtgccgtttccagcgcaatattgtcctgcatccatttaccgagccacggcttcaggtcgatgtcatccgcctggagccagacgcgaccattgcttaacaacccctcatcatcgcgcaaatccatgcgcacctgcatcacgccgtgctgtccggtaaggctggagaggcttaccaggccttccgcacggtgtcgacgtggatcgttcagccaggtgagttgtgggatcgccagctcggcgcgctgaccggatggcgtcaggaaactgacttcactgtcgcgaagatcgaaatggtcaaattgacgaagaaacagatcgctgatgtgactggcttccagactgtcatcactaccaccgctggtgataggagtgttggtgcgaaagcgcagctgccagaaagtgaggtcgcgaaactgccagcgcatatgtaacaggctctgccagacatccagcgccagagtaacgcgtttaacgctaaattcgccgccatcttttagttctgcacggatgtcgtgtgcttcaagcgtcgggccaaaattctgccagctggcactgagctgactggcttctaccggcatgccagtcgcggattctattttgttgaggatttccggacgccaggcgtcaagatgcggtaaagcaatacgcaggccgctaaccagcagggcagcgatcacaacgagcgcggctccagtaagcagtaaaatccccggcaatcgcctcacccgtcactccttgtctgctaaaaatgtgactcaaaaaccctttgccggatggcggcccagcatctgtttacatcattacgacgtcaaactgctcctggttatagagcggttcaatttgtactttaacctgtttgccaacgaaaatttccacttccgccaggctgtgactctcttcgcctttcaaggcttcagctactgccggagaagcatagaccaggaaacggtcggagtcgtaagcatggtggacacgaacaatctcgcgcatgatttcatagcataccgtttccacggttttcaccgttccgcgaccgtggcaggttgggcattcgttacacagtacgtgctcaatgctttcgcgggtgcgtttacgcgtcatctccaccagccccagcgcgctaaaaccattaacgctggttttcacccggtctttgctcaacgcctgctccaggctgtgcagcactcggcggcggtgatcttcattattcatatcgatgaaatcaataatgataatcccgcccagattacgcaaccgtaactggcgagcgatagcctgcgtcgcttcaatattggtattgaaaatggtgtcgtccagattgcgatgaccgacaaacgctccggtattgatgtccacggtggtcatcgcttcggtctggtcgataatgagataaccaccggatttcagttctactttgcgttccagcgctcgctggatttcgttttcgacatcaaagagatcgaaaatcggctggcgtcctgtgtaatgctccagcttgcttgtcatctcgggaatgtactcgctggtgaactcaagtaacgcttcgtaagtcaggcgactgtcaacgcgaatgcggtccagttcggcatcggcgaaatcacgcagaacacgctgcgccagcgccagttcgccgtacagctgataacgggtctgcgggcgttttttacgctccataactttggtccagacgcgtttcagataagcggcatcggaggccagttcagcctcgccaaccccttccgctgcggtacggatgataaacccgccctgctcgtcgcaatactctgcgaccacttttttcaggcgttcacgttcactttcgctttcaatacgttgggaaaccccaacgtgagaagcccctggcataaacaccagatagcgagaagggagcgtgatatcggtggtcaggcgcgcacctttagtgccaagcggatctttcaccacctgcaccatcagatcttgcccctgacgaaccagttcgctgatgtcgcgcaccgtgaattgcttttgttcttcacccgccacacattcggtgtgcggcatgatgtcggatgcatgaagaaacgcggctttatccagcccaatatctacaaaagccgcctgcatacccggaagtacacgacttacacgacccttgtagatattgcctactattccgcgtcgcgcctcacgttcaatatgaatttcctgcagaataccgccatcaatatacgccactcgcgtttcgctaggcgttacgtttactaacaattcagccgtcatgtttatcccttttctcacgcagtgcgttaaaattacttaataattcatacgtttcaaccagcggtaagccgactacggcgtgatagctgccatttatcttcctgacaaaacagccacccagcccctgaataccgtatgcacctgctttatctaacggttcatcgctggcgacatagcccgcgatgtcttcgtctgttaacgttctgaaagtcacatcggtgaccaccaggcaatcgagaatgtgctggctgtcggccaacgccactgctgtcatcacctgatgggtctgaccgcttaatttgcgcaacatctgcgccgcatgctctgcgtcgcgcggtttctccagcacttctccgttcaggataacgatagtatccgcacccagcaccgggagatccttcgccgtttgcgcgacacctgcccgtgctttctcgcgcgccagacgcacaacatactgctgcgcgctctcctgcggctgacgctgctcctcaatgcccgtaacaatacgttcaaaggtcacgccaagttgcgcaagtaactcctgacgacgcggagaaccggaagctaaatacagagaagtcatagaaacctttattgcactgcaaactgctgacggactttgcgcatcagcaagaaaatccacggccagagcaccccattgactacactactccagaacacttccggtctgaaagagacgttaatcactaaaaactctgcccagaaaacaataatatccaccaccaggctaagcaacatgacgaccagcgcctgctgccataatgcgaggttgcggaaaagctggtatttcagcgccaccaggtaagcaatgatgctcatcgccaatacgcgtacgccaagcgtgctgccgctgatcagatccagtatggcacccatcacaaaacctgtgcccacatttacgcgatgaggcaaggccaggatccaatacaacaagatgagtaacacccagtttggccggaaaacaatcaggttatccggccagggcatgatttgcagcaacagcgcaatgaggaaagagagccagattacccagcgtccctggctacgatagctcgccactattgccctcccggcgcacgttattgccctcccggcgcacgcgcaggcggttgagcaccactttgcggcggcgtagccctttgtggagagcgattagcagcaggctgtgtcggcgcagcaggcgcagtagctgcatttcctgtcgccggttgctgcggagtcggctgagcgatccccgttgccggttcaggtaactttggccccatcgcgtctgggctaggcaatacctgcggcatcatctgcatcagacgttcattagcaacacgatgcacctcttccggcgtcatcgggttagcgccgttacgatctgccccccacagcagcagcagataacgcaaacgttgcagccctgcagtcggacgcgcctgaatcacagtataagcgcgctgggtatcgagttttacggaagagacaaccgcgaccggatagccttccgggaaacgaccgcccagaccggaagtcaccagcacatcaccaacacgaatatccgtattcgccggcagatgctcaagctgcaaatcatccgtacaaccgttaccggctgcaattacgcggatatcgttgcgcagcacctggattggcagcgcgtgggtcgcatcacaaatcagcagcacgcgactggtcagtttagcgacggccaccacctgaccaacaacacctttgtcgctgatgaccggctggccttcataaacgccattaacgctacctttatcgataacaacttgatcgctataaggatcgttaaccgtggagataacctgagtcaccattttctgctcatcctgacgcagcggggaacccagcagctcgcgcagacgcgcgttctcctgtttgtattgtccaagcatcagcagttcactgtttttcagcaacagttcctgacgtaacgcccggttttcaagttctaattggtcacggctggccagcgtctggcttacgccatccagcaattcacgaggagcattggaaacaaagtagaaaggactgacggcggtatccatataagtacggatttgactgaacgtccccaggcggctgtcggcaataataatgccgagcgccaccagcaccgccagaataaggcgaatctgtaggctcgggccacggctaaaaattggcttcataagttatgcgtattctcgtatcagaccaggcagggtaaacagacacttcccctgcctgcatccgattactcttcgctgaacaggtcgccgccgtgcatgtcgatcatttccagcgctttgccgccaccgcgcgccacacaggtcagcgggtcttcagcaacaacgactggaatgccggtttcttccattaacaaacggtcaaggttacgcagcagtgcgccaccaccggtgagcaccatgccgcgctcggagatgtcggaagccagttccggcgggcactgttccagtgcaaccattaccgcgctcacaataccggtcagcggttcctgcagtgcttcgaggatttcattggagttcagggtaaaaccgcgtggaacaccttctgccaggttacggccacgaacttcgatttcacggacttcatcgcccggataagcgctaccgatttcgtgcttgatacgttctgcggtggcttcaccgatcagagaaccgtaattacgacgcacatagttgatgatagcttcgtcgaaacggtcaccaccaatgcgcacagaagaggagtaaaccacaccgttcaaggagataacagcaacttcagtggtaccaccaccgatatcaaccaccatagaaccggtcgcttcagaaaccggcaggccagcaccaattgcggcagccatcggttcttcaatcaggaagacttcacgggcaccagcgccctgcgcggattcacgaattgcgcggcgttcaacctgggtcgcgccaaccggcacacaaaccagaacgcgcgggcttggacgcataaagctgttgctgtgcacttgtttgatgaagtgctggagcattttttcagtcacgaagaagtcggcgataacgccgtctttcattgggcgaatggcagcaatattgcccggcgtacggcccagcatctgcttcgcgtcatgacctactgcagctacgcttttcggactaccggcacgatcctgacgaatggccaccacggaaggctcattcaatacgatgccttgtccttttacataaatgagggtattcgcagtacccaggtcaatggacaagtcattggaaaacatgccacgaaattttttcaacatactaagggataatcctgaaagctggggcggaaaagaaaatccgcttactttaccaaccacacgcagcagcgacaaggcgcaaaaatcatctgctacggtgaaaattagtgcagttcgtttcctttgttacaaatctctgcctgagtccagaaaggcttaatgcatcagcagcattcctcgcctgtttgcaaccgcgtaaggtcattcatctgcatatgtgctgcaacaatctggcgagcagacaagcacactcccatgagacgcagcgcgcattattctacgtgaaaacggattaaacggcaggttaaacgctgtatctttgactatattttttcacgttagtatcaagtggctgactggacgcgaaaaaatccccttgcccgcctgtaacaccgcgctgaatcagggtctgccactcgcttcggctacgcacgccggtggcgtaaacctgggtgctggtcccggagcaggcttccaccaggctttgaaccagcagctggttctccgttcgcttctcaatgtttctgaccagccccggatggagcttgagtaactcaacattaagttctttgatccaactggtacttaccagcgtcaaaccagcctggttgacggctacccgtacccctaaagcattcactaaacgaataacaggttgtaaacgactgatatgttgacctacatcggcctctgcaagttcaataattatgcgttttcgttgacttttttcacattgcattaacgtatcgcgcagccaacgctgaaaacgcgggcgaatcaggctctcaacggtaacctgaatcgccagattttcctctggccagtaacgcaatagtggaataagacggctgatttgcagacggtcatactcttcgcttaagccaaactgcaagaccatcggcatatgctccgcgctgctaacctcttcattaccatcgaagatgcggcacatgagttcgcgatgatgaacctgaccttcgcgagtaaccgccggtttttgataaaggcgcgggccgccgcgactgagcatttgctcgataagcgtacgccagcgaacattaccgcgtcctttttcaggcaagctgtcatcgtaaatagcccagctattgccgccctgcaatcccgcattacgcgtggcagactctgcatgttccattacctgctcggtatcctgaccactacgccaggcgcagataccaatgtggatcatatcgtcgcgatcgagcattttattgttcggcaaggtatcaacggctttgattaactgaccggcgatgctctctgcctcttttaacgtccggtgcggtaacagcgcagcaaaatcactgcggtggtaacgcgccagcagtgcgccagggtagcgcatcataaatgtgctcagcagattcgtcagagtgaagaactgttcttcaacctggctgtgcccccaggtatcgctcaacatattgaaatccggcagacgaatcatcatcacgatcccgtgggtacctactttctcctgatcttccagtaacgttgctaactgattatcgaaaaagagtcggttattgaggccggttttcacgtcctgggcggcataagagcggatcagcgtatcaagacggctgtgttgttcgcgtgcgttctgaatttcacgaagcagcgtatccagcgcactgctggttctgggcggccattcatagatggttcccaacacattagagccacgctcaccgtttaagatacgagtagcccgggtttccagcaattcttgcccggcaagttgccgttgtaaccagcgtaccgccaggaagagcataacaatgataaagccaatcgcccccgtgagcggcgcggtggtcatcaagctatggaaatagttgcccatcggatcctgataaaccagacgcaagctcatccccggatgctttatcaacggaacgctcagttcgcgaaacagatcgctggagccaactggacgataactaccatttctggccagggtataaacctgtttatcaccatggagcaggtctacacgaacgatatctgcgctcatcattaattcggtaatttgtggccttaatacgctgaagtcattgctcacaaggtgggtatcaatcgccgtcgccaccgcctgaacgcgatgactaaacttatactgaatggcgttgtagaaacttaggctacagcccagcaaagtcacaaaaattgttaacccggtgagcagcgtaacaaaggcgctaaatttcgtcgttaatctcatccttgtgttaactccgatagtgaggaagcgggcatactagcaaatcagatttatctcgcaatttattgcgcttcatcggctttgcttttccattagcgagtatagtcttcagaaattattttccaatccatcatgcacatgaggaccacttatgcaggcgttacttttagaacagcaggacggcaaaactctcgcaagtgtacagactctggacgaaagtcgcctgccggagggcgatgtcacggtcgatgttcactggagcagcctgaactataaagatgcgctggcgattaccggtaagggaaaaatcatccgtaattttccgatgattcctgggatcgattttgccggaactgtacgcaccagcgaagatccgcgttttcatgccggtcaggaggtgttactcactggctggggcgttggtgaaaaccactggggtgggctggcggagcaggcgcgagtgaaaggtgactggctggttgccatgccgcaagggctggacgcgcgtaaagcaatgattatcggtactgccggttttaccgccatgctgtgtgtgatggcgctggaagatgccggtgttcgcccgcaggacggggagattgtcgtgacgggtgccagtggtggcgtcggcagtaccgccgtggcgctgctgcataagttgggttatcaggtcgttgccgtttccggtcgcgaaagtacccatgaatatctgaaaagtttaggtgctagccgtgttctccctcgtgatgagtttgccgaatcccgtcctctggaaaaacaagtctgggctggggcaattgacaccgttggcgacaaagtgctggcaaaagtgctggcgcaaatgaattacggcggctgcgtggcggcctgtggtctggcgggtggttttactctgccaaccacggtcatgccatttattctgcgtaatgtccgtttgcaaggggtggatagtgtaatgacgccaccagaacgccgcgcacaagcctggcagcgactggtcgccgatttaccggaaagtttctatacccaggcggcaaaagagatatctctgagtgaggcaccgaactttgccgaggccatcattaataaccagatccagggtcgcacgctggtgaaggttaactaaccatttagcagggaataataagagagggaactcattttgaaatcattattcaatcggttaacgggaaaagcggttagccggacagctttcgtcgaacaccttggtcaggaagttatacaacatcatccaaactggaaagtcatgatttcgactgaccacaaattgatgcgcattgatactccactaaacagctattattgatacgcctccgtcgcctgttaggtttatgttgctttgcctgggcgacgctacgcttagccccttacttatttctggtaccatggggtgaataatctgattttgtttgactacaaattaatcactcgaacctatttaatgctgagcattgtcaatcggttaattttgcgtgctttagcattcacatctatccagacgatgcagtgaaaattgggtaatccccagcaaccgctgcgtaatgtcgtctatcttgtcgcgatcctggcatccctacattatttgtggtctgtgaagattatctcattgcagcccctcatcttcgcagggctggcttttcagcttttcaccttacgttataagaagttccgtcgatgatggcgctaatttcgtgaattgtgcggcttgttgcaaattacacggtgttgaaggttatttacatgttagctgttgattatcttccctgataagaccagtatttagctgccaattgctacgaaatcgttataatgtgcgacctcgtcctccctgacgcagtttttgcgctgcggaaaaggtgacattggcgcaacgaaggtatattttgttttttgccggaggatagcagcagatcgctgcacaatgtccgtcaagtctaacattgacactctggggcaaaatagaccggcgtcccggcctgctggaatttatcgctatgcatacagctgtcggggcatacgctttacagacggcggtgaaacgcctgtcacaatcacactaaacaaagagtacggaacccactcatggatattcgtaagattaaaaaactgatcgagctggttgaagaaagtggcatctccgaactggaaatttctgaaggcgaagagagtgtacgcattagccgtgcagctcctgccgcaagtttccctgtgatgcaacaagcttacgctgcaccaatgatgcagcagccagctcaatctaacgcagccgctccggcgaccgttccttccatggaagcgccagcagcagcggaaatcagtggtcacatcgtacgttccccgatggttggtactttctaccgcaccccaagcccggacgcaaaagcgttcatcgaagtgggtcagaaagtcaacgtgggcgataccctgtgcatcgttgaagccatgaaaatgatgaaccagatcgaagcggacaaatccggtaccgtgaaagcaattctggtcgaaagtggacaaccggtagaatttgacgagccgctggtcgtcatcgagtaacgaggcgaacatgctggataaaattgttattgccaaccgcggcgagattgcattgcgtattcttcgtgcctgtaaagaactgggcatcaagactgtcgctgtgcactccagcgcggatcgcgatctaaaacacgtattactggcagatgaaacggtctgtattggccctgctccgagtgtaaaaagttatctgaacatcccggcaatcatcagcgccgctgaaatcaccggcgcagtagcaatccatccgggttacggcttcctctccgagaacgccaactttgccgagcaggttgaacgctccggctttatcttcattggcccgaaagcagaaaccattcgcctgatgggcgacaaagtatccgcaatcgcggcgatgaaaaaagcgggcgtcccttgcgtaccgggttctgacggcccgctgggcgacgatatggataaaaaccgtgccattgctaaacgcattggttatccggtgattatcaaagcctccggcggcggcggcggtcgcggtatgcgcgtagtgcgcggcgacgctgaactggcacaatccatctccatgacccgtgcggaagcgaaagctgctttcagcaacgatatggtttacatggagaaatacctggaaaatcctcgccacgtcgagattcaggtactggctgacggtcagggcaacgctatctatctggcggaacgtgactgctccatgcaacgccgccaccagaaagtggtcgaagaagcgccagcaccgggcattaccccggaactgcgtcgctacatcggcgaacgttgcgctaaagcgtgtgttgatatcggctatcgcggtgcaggtactttcgagttcctgttcgaaaacggcgagttctatttcatcgaaatgaacacccgtattcaggtagaacacccggttacagaaatgatcaccggcgttgacctgatcaaagaacagctgcgtatcgctgccggtcaaccgctgagcatcaagcaagaagaagttcacgttcgcggccatgcggtggaatgtcgtatcaacgccgaagatccgaacaccttcctgccaagtccgggcaaaatcacccgtttccacgcacctggcggttttggcgtacgttgggagtctcatatctacgcgggctacaccgtaccgccgtactatgacagtatgatcggtaagctgatttgctacggtgaaaaccgtgacgtggcgattgcccgcatgaagaatgcgctgcaggagctgatcatcgacggtatcaaaaccaacgttgatctgcagatccgcatcatgaatgacgagaacttccagcatggtggcactaacatccactatctggagaaaaaactcggtcttcaggaaaaataagactgctaaagcgtcaaaaggccggattttccggccttttttattactggggatcgacaacccccataaggtacaatccccgctttcttcacccatcagggacaaaaaatggacactcgttttgttcaggcccataaagaggcgcgctgggcgctggggctgacccttttgtatctggcagtttggttagtagccgcttacttatctggcgttgcccccggttttaccggctttccgcgctggtttgagatggcctgcatcctgacgccgctgctgtttattggactgtgctgggcgatggtgaaatttatctatcgcgatatcccactggaggatgacgatgcagcttgaagtaattctaccgctggtcgcctatctggtggtggtgttcggtatcagcgtttatgcgatgcgtaaacggagcaccggcaccttccttaatgagtatttcctcggcagccgctctatgggcggtattgtgctggcgatgacgctcaccgcgacctatatcagtgccagtagctttatcggcgggccaggagctgcttataaatacgggctgggctgggtattgctggcgatgattcagcttcctgcagtctggcttagtctcggtattctcggcaagaagtttgcgattcttgcgcgccgctacaatgcagtgacgctgaacgatatgctgtttgcccgctaccagagtcgtcttctggtgtggctggcgagtttgagtttgctggttgcgttcgttggtgcgatgaccgtgcagtttatcggcggtgcgcgcctgctggaaaccgcggcgggtattccttatgaaaccgggctgctgatttttggtatcagcattgcgttatataccgcctttggtggctttcgcgccagcgtgctgaacgacaccatgcaagggcttgtgatgctgattggcaccgttgtgctgcttattggcgtagtacatgccgctggcggcttaagtaacgcagtacagaccttgcaaaccatcgatccgcaactggttacgccacaaggcgctgacgatattctgagccctgcctttatgacgagcttctgggtactggtgtgttttggcgtgattggcctgccgcatactgcggtgcgctgtatctcttataaagacagcaaagccgtacatcgggggatcatcatcggtacgattgtggtcgcaattctgatgttcggtatgcacctggccggagcgttaggtcgggcggtgatccccgatctcaccgtaccggacctggtgatcccaacgttaatggtaaaagtgctgccaccgtttgctgccgggatcttcctggctgcaccgatggctgcgatcatgagcacaattaacgcccaactgctgcaaagttccgctacgatcattaaagatctctatctgaatatccgtccggatcaaatgcaaaacgagacgcgtctgaagcggatgagcgcggtaattacgttagttctcggcgcgttgctgctgcttgccgcctggaagccgccagaaatgatcatctggctgaatttgttggccttcggtgggctggaagccgttttcctgtggccgctggtgctgggtctttactgggaacgcgccaacgccaaaggcgcgctaagtgcgatgatcgttggcggcgtgctgtatgccgtactcgcgacgctgaatattcagtacctgggcttccaccctatcgtgcccagcttactactaagtttgctggctttcctggtcggaaaccgtttcggtacatccgtcccgcaagctaccgttttgactactgataaataaagagttttgccatgccttggatccaactgaaactgaacaccaccggcgcgaacgcggaagatcttagcgatgcgctgatggaagcgggtgccgtttctatcacttttcaggatacccacgatacgccagtatttgaaccgctgccgggcgaaacgcgcctgtggggcgacaccgatgtgattggtctgttcgacgctgaaaccgatatgaacgacgtggtggcgattctggaaaaccatccgctgctcggcgcaggcttcgcgcataaaatcgaacaactagaagataaagactgggagcgcgaatggatggataatttccacccgatgcgctttggtgaacgactgtggatctgccctagctggcgtgatgtgccggacgaaaacgccgtcaacgtgatgttagatccagggctggcgtttggtacgggtacccatccaaccacctctctgtgcctgcaatggctcgacagcctcgatttaaccggtaaaacagtcatcgactttggctgtggttccggcattctggcgatcgcggcgctgaaactgggtgcagcaaaagccattggtattgatatcgatccgcaggcgattcaggccagccgcgataacgccgaacgtaatggcgtttctgaccgtctggaactctacttaccgaaagatcagccagaagaaatgaaagccgacgtggtggtcgctaacatccttgcaggcccattacgtgaactggcaccgttaatcagcgtcctgccggttagtggcggtttgctgggcctttccggtattctggcaagccaggcagagagcgtttgtgaagcttatgccgatagcttcgcactggacccggtcgtggaaaaagaagagtggtgccgtattaccggtcgtaagaattaaccttcgcatcgccgtagggtgacgcggggcgaagtgcgagcaagctcacaaaaggcacgtaaatttgccgattatttacgcaaatttgcgtgccaaaattttcattcataaagaaaaattgagaacttactcaaatttctttgagtgtaaattttagtcactattttctaatatgatgatttttatgagtaattatcgcaccacgctcattttaaatgcaattctttgatccatctcagaggattggtcaaagtttggcctttcatctcgtgcaaaaaatgcgtaatatacgccgccttgcagtcacagtatggtcatttcttaactcatgcgcatcggacaatatcagctcagaaatcgcctgatcgcagcgcccatggctggcattacagacagaccttttcggacgttgtgctacgagatgggagccggattgacagtatccgagatgatgtcttctaacccacaggtttgggaaagcgacaaatctcgtttacggatggtgcacattgatgaacccggtattcgcaccgtgcaaattgctggtagcgatccgaaagaaatggcagatgcagcacgtattaacgtggaaagcggtgcccagattattgatatcaatatgggttgcccggctaaaaaagtgaatcgcaagctcgcaggtagtgccctcttgcagtacccggatgtcgttaaaagcatccttaccgaggtcgtcaatgcagtggacgttcctgttaccctgaagattcgcaccggctgggcaccggaacaccgtaactgcgaagagattgcccaactggctgaagactgtggcattcaggctctgaccattcatggccgtacacgcgcctgtttgttcaatggagaagctgagtacgacagtattcgggcagttaagcagaaagtttccattccggttatcgcgaatggcgacattactgacccgcttaaagccagagctgtgctcgactatacaggggcggatgccctgatgataggccgcgcagctcagggaagaccctggatctttcgggaaatccagcattatctggacactggggagttgctgcccccgctgcctttggcagaggttaagcgcttgctttgcgcgcacgttcgggaactgcatgacttttatggtccggcaaaagggtaccgaattgcacgtaaacacgtttcctggtatctccaggaacacgctccaaatgaccagtttcggcgcacattcaacgccattgaggatgccagcgaacagctggaggcgttggaggcatacttcgaaaattttgcgtaaacagaaataaagagctgacagaactatgttcgaacaacgcgtaaattctgacgtactgaccgtttctaccgttaactctcaggatcaggtaacccaaaaacccctgcgtgacagcgttaaacaggcactgaagaactattttgctcaactgaatggtcaggatgtgaatgacctctatgagctggtactggctgaagtagaacagcccctgttggacatggtgatgcaatacacccgtggtaaccagacccgtgctgcgctgatgatgggcatcaaccgtggtacgctgcgtaaaaaattgaaaaaatacggcatgaactaattcaggttagctaaatgcttgattaaaaaggcgctactcggcatggggaagcgccttttttataggtgtcacaaagggagtgaccatgagaacaggatgtgaaccgacccggtttggtaatgaagctaagaccattattcacggtgatgcgcttgccgaacttaaaaagatccccgccgaaagtgtcgatctgatctttgccgacccaccatataacatcggtaaaaattttgatggtctgatcgaagcctggaaagaagatctgtttatcgactggctgtttgaagtgattgcagagtgccaccgcgttctgaaaaagcagggcagcatgtacatcatgaacagtacggaaaacatgccctttatcgatctccagtgccgcaagctttttaccatcaaaagtcgcatcgtctggagttatgacagttctggagtgcaggcgaaaaaacactacggctccatgtacgaacccatcctgatgatggtgaaagacgcaaagaactacacattcaacggtgatgctattctggtagaagccaaaaccggaagccagcgcgcgttgatcgattatcgcaaaaatcctccacagccttacaatcatcaaaaagtaccgggtaacgtttgggattttccgcgcgtgcgttatttgatggatgaatatgaaaaccacccgacgcaaaaaccggaagccttactgaaacgcattattctcgcctcttccaacccaggcgatatcgttctcgacccgtttgctggtagctttactaccggtgccgtagccatcgccagcggacgaaaattcattggtattgagatcaacagcgagtacatcaaaatggggcttcgacggctggatgtcgcgagccattactctgcggaagaactggcgaaagtgaaaaaaagaaagaccggcaacctgagtaaacgaagccggttaagcgaagttgaccccgatctcattacaaagtaaaggatgtgtaagcctggttttcagattattcatttcgtgtatatttcctgccagacttggttaaacatgcacaggctcaggtaatgattcgcaagtattggtggctcgtcgttttcgctgtcttcgtttttctgtttgatactttactgatgcagtggattgaactgctggcaacagaaacagacaaatgccgcaatatgaacagtgttaatccactaaaactggttaactgtgacgaactgaattttcaggacagaatgtgaatttacatgacacttaattcattcgtttgatgaattaatttcgttatgttttcatctggcatgaacattcttaatacgttatcgaccagagcgggggcttgtttataaagatcataacccgccatattcattaaccagttttgaacaattccgctgaaggcaccatcaataataatcatcacaacatctaaatcgaggttatttgctacacaaccttgttgctgacacgcctgcaatacttcgcggagagtctgcggattaaagcccatcttttcgcgtatcactccctcggccagcatctcatcattaaattcacatttgtgatataagattttcagcaacgcctgctggcggggaattttggcaatatattgcaagccgacaatcaatttttcacgcaattgttgaaacgggtcatgctctaatccagccgtcaagtgttcctggattaactcccgcaaactaggctgttgcaaccacatctcattaaacagttgagtcttgttttcgaagtgccagtagatagcgccacgcgtaacgttagcggcgtcggcaatgtcgttgagcgtcgtcttgcttacgccatgctgcgcaaactgggcgatggcagtttcaatcagttcttgccgggtcttcagagcttcggctttggttctttttgccatgattaattattcaggaaataaatatattcgacacagagtgagaaaatagcgaaggttaatctatcacctaatgtgtatttatacgagaggctaatattgagttgctataaatcgttaaataaataatatatattatttacctaagatacattcactacatcaatatatatttcaatttacgaggttttaattctgcctctttcaacccgcgtcaaaataaaacagtagaatattaatctttttttgtgtttatgtgccttgagatgcctgtattcataactattccttacatcgacgaatgataatttgtaggatagcgaactgtatttttctttctgcgagttaacgcgttgcctttttgggtaaataacgcgcttttggttttttgaggaatagtaatgacgaaacatgccaggtttttcctcctgccctcctttattctgatctccgcggctttaatcgccggttgtaacgataagggagaagagaaagctcacgtcggtgaaccgcaggttaccgttcatattgtaaaaacggccccgttagaagttaagactgaattaccaggccgcaccaatgcttatcgtatagccgaagttcgcccacaggttagcgggatcgtactgaatcgcaatttcactgaaggcagcgatgtgcaagcaggccagtccctgtaccagatcgatcccgcgacctatcaggcaaattatgacagcgcgaaaggcgaactggcgaaaagtgaagccgccgccgccatcgcgcatttgacggtaaaacgttacgttccgctcgtgggtacgaaatacatcagccagcaggagtacgaccaggccattgctgatgctcgtcaggccgatgccgccgtgattgccgcaaaagccacagtcgaaagcgctcgcatcaatcttgcttataccaaagtcactgcgccaattagcggacgtatcggcaaaagcactgtgaccgaaggcgctcttgtcactaatgggcaaacgactgaactggcgactgtccagcagctcgatcctatctacgttgatgtgacccaatccagcaacgattttatgaggctgaagcaatccgtagagcaaggaaatttgcataaggaaaacgccaccagcaacgtagagttggtcatggaaaacggtcaaacctatcccctgaaaggtacgctgcaattctccgatgtgaccgttgatgaaagcaccggctccataaccctacgtgctgtcttccctaacccgcaacatacgcttttgccgggtatgtttgtgcgtgcacggattgatgaaggcgtccaacctgacgccattcttatcccgcaacaaggcgttagccgcacaccgcgtggtgatgcaaccgtgctgattgttaacgataaaagtcaggttgaagcgcgccctgtcgttgccagtcaggcgattggcgataaatggttgattagtgaaggactgaaatctggcgatcaagtcattgtcagcggcctgcaaaaagcgcgtccgggagagcaggttaaagccactaccgatacccccgcagatactgcaagcaagtaaggtaatctgacatggcaaacttttttattcgacgaccgatatttgcatgggtgctggccattattctgatgatggcgggcgcactggcgatcctacaattgcccgtcgctcagtatccaacaattgcaccgcctgcggtttctgttagtgcaaactatccgggcgctgatgcgcagaccgtgcaggatacggtgacgcaggttatcgaacagaatatgaacggtatcgataacctgatgtatatgtcctccaccagcgattccgccggtagcgtgacaattacccttaccttccagtccgggaccgatcctgatatcgcgcaagtgcaggtgcagaacaaactccagctcgccacgccgttgctgccgcaggaggttcagcagcaggggatcagtgttgaaaagtccagtagcagctatttgatggtggcgggctttgtctctgataacccaggcaccacacaggacgatatcagcgactatgtggcctctaacgttaaagatacgcttagccgtctgaatggcgtcggtgacgtacagcttttcggcgcacagtatgcgatgcgtatctggctggatgccgatctgctaaacaaatataaactgacaccggttgatgtgattaaccagttgaaggtacagaacgatcagatcgctgccgaacagttgggcggaacgccagcgttaccagggcaacaattgaacgccagcattattgctcagacgcggtttaaaaatccggaagaattcggcaaagtgaccctgcgcgtaaacagtgacggcagcgtggtacgcctgaaagatgtcgcacgggttgaacttggcggtgaaaactataacgttatcgctcgtatcaacggaaaaccggcggcgggcctggggattaagctggcaaccggcgcgaatgctctcgataccgcgaaagccattaaggcaaaactggcggaattacagccattcttcccgcagggaatgaaggttctctacccttatgacaccacgccattcgtccagctttctattcacgaagtggtaaaaacgctgttcgaagccattatgctggtgttcctggtgatgtatctgttcttgcagaatatgcgagcaacgctgatccccgccattgcggtacccgtggtgttgttagggacgtttgccatcctcgccgcttttggttactccatcaacacactaacgatgttcgggatggtgcttgccatcgggctgctcgtcgatgatgcgatagtggtggtggagaacgtcgagcgcgtgatgatggaggataagctcccgccaaaagaagcgacggaaaaaagcatgagccaaattcagggcgcactggtgggtatcgcgatggtgctgagtgcggtatttattccgatggcattcttcggcggttctactggggcaatttatcgccagttctctatcaccatcgttagcgcaatggcgctttctgttctggtggcattgattcttacccctgcgttatgtgcaacgctgcttaaacccgtctctgctgagcatcacgaaaataagggcggtttcttcggttggtttaataccaccttcgatcatagcgttaaccactacaccaacagcgtcggcaaaatcctcggatccacaggacgatatttactgatctatgcgctgattgttgcaggaatggtggtgttgtttttacgtcttccgtcttccttcttacctgaagaggatcagggtgtctttctgaccatgattcagttacccgctggcgcgacgcaagagcggacgcaaaaagtgttggatcaagttacggattactatctgaagaacgagaaagcgaacgttgaaagtgtctttacggttaacggctttagcttcagcggccaggcacaaaacgccggtatggccttcgtcagtctgaaaccgtgggaagagcgtaatggtgacgaaaacagtgcggaagcggtaatccatcgtgccaaaatggaattgggcaagatccgcgacggttttgtcattccattcaatatgccagccattgttgaactgggcacggcaacgggtttcgactttgagttaattgatcaggctgggctgggtcacgatgccctaacccaggcccgtaaccagttgcttggtatggcggcgcaacatcctgccagcttagtcagcgtgcgccctaatggcctggaagacaccgcgcagtttaaactggaagttgaccaggaaaaggcgcaggcattaggtgttagtctttctgacatcaatcagaccattagtacggcgctgggtgggacttacgttaacgacttcatcgaccgtggccgcgtgaaaaagttgtatgttcaggcggatgccaaattccgtatgctgccagaagatgtcgataaactttatgtccgcagcgccaacggcgaaatggtgccattcagcgcctttaccactagtcattgggtgtatggctctccgcgactggaacgctacaacggtctgccgagtatggagattcagggggaagccgcgccaggaaccagttccggcgatgccatggcgttgatggaaaaccttgcgagtaaattacctgcgggcattggttatgactggacgggtatgagctatcaggaacgcttaagcggaaaccaggctcccgctctggtagcaatttcctttgtggttgttttcctgtgccttgctgcactctatgaaagctggagtattcctgtcagcgttatgttggtagtgccgttagggattgtcggcgtgctgctggcggcgacactctttaatcaaaaaaatgacgtctactttatggtgggcttgctaacgacaattggcttgagcgccaaaaacgctattttgatcgttgagttcgctaaagatctcatggagaaagagggtaaaggtgttgttgaagcgacactgatggcagtacgtatgcgtctgcgtcctatcctgatgacctctctcgcctttattctcggcgtattaccgctagctatcagtaacggtgccggcagtggcgcgcagaacgctgtgggtatcggggtaatgggaggaatggtctctgcaacgttgctggcaatcttcttcgtaccggtgttctttgtggtgatccgccgttgctttaaaggataaatcagaaacataaaggcgctttcgggtgcctttattatttccagtgaaacccataaaaattaataagatattcttctgctcactctttaaaagctttctatagttcccgctcccttcactatttttacaattcacataatttgtcattattcattccgcaagatttataacctccggtgataaaatggcattcagctcgttaataagagagttaacttattaagcgttagcgtttattactgaggtaacaccatgaaaagattaattcctgtggcattgctcaccgcattgctggcgggctgtgctcacgatagcccctgcgttccggtttatgacgatcagggtcgtctggttcacaccaatacctgtatgaaaggcacgactcaggataactgggaaacggctggggctattgccggcggggcagctgctgttgctggcctgacgatggggatcatcgctctaagcaaataactgaacagggcgcggagttccgcgctctttttaacgatacagtatctctccataagataaaatattgctatattctgctgggtaattccctgctgatttagcatgttacatcgcgttatttcgctgctttcgaaataacgcatcaatttaattttcacacttcccaccagaaatatactcacgctaacaatcattattctgcttagtaaaacacgcgtaaatattttgcgccaaaatgtggcgcatgtttcattttcgcaccattgcggggcgctgtttttattatttcctgtctacactcagcttattgcgacgcgaaatcgtgcgcaaaagctggcactacttttgcttataagaggatggccacagacaggtaaaagacgtttcccaaacgtcctataacgataattttcgcctcacaggaagcattatgaaaaagatgatgatagccacactggctgccgccagcgtgctgcttgccgttgcaaatcaggcgctgctggcgcgacgcttgatgccgttcagaaaaaaggttttgtgcaatgcgggatcagtgatggattacctgggttctcttatgccgatgctgacggtaagtttagtggtattgatgttgatatttgtcgtggtgttgccgctgctgtatttggtgacgacacgaaagtgaaatataccccgctcactgcaaaagaacgcttcaccgctttacagagtggggaggtggatttgctctcccgtaatacgacctggactagttctcgcgatgccgggatgggaatggcatttaccggcgtcacttattacgacggcattggcttcctgacgcacgataaagcggggctaaaaagcgcgaaagaactggatggcgctaccgtctgtattcaggcgggtactgataccgaactcaacgtcgccgactacttcaaggcaaacaatatgaagtacacaccggtgactttcgatcgctctgacgaaagtgcgaaggcactggaatctggtcgctgcgatacgctggccagcgatcaaagtcaactgtatgccctgcgcatcaaattaagcaacccagctgaatggattgtcttaccggaagttatcagtaaagaaccgcttggtccggtagttcgtcgtggcgatgatgaatggttcagcattgtacgctggacgcttttcgccatgctgaatgctgaagagatgggcatcaattcccagaacgtcgatgaaaaagcggctaatccagcaacgcctgatatggcacatctgctgggtaaagaaggcgattacggcaaggatctgaagctggataataaatgggcctataacatcatcaaacaggtgggtaactacagcgaaatttttgagcgtaacgtaggtagtgaaagcccgctgaaaattaaacgtgggcaaaataatctctggaataacggcggtattcagtacgcaccgcccgtgcgttaagtcggtgtgaggtaacgagcgtcgctacggcggcgctctcttcagcgttatgctttccgaggtttctatgtctcatcgccgcagtaccgttaaaggcagtctctcttttgccaaccctacggttcgcgcctggttattccagatccttgccgttgttgctgttgtcggcattgttggttggttatttcacaacactgtaacgaatctcaataatcgtggcattactagtggttttgcctttctggatcgcggcgctggcttcggtattgtccagcatttgatcgattaccagcagggcgacacctacggacgcgtttttattgtcggcttactcaatacgctactggtttctgcattgtgtattgtgttcgcttctgttttgggcttctttatcggtctggcgagacttagcgataactggctgctacgaaagctttccacaatttatattgagatcttccgtaatattcccccgctgctgcaaatcttcttctggtactttgccgtgttgcgcaatttgcccggaccacgccaggctgtgagcgcgtttgatctggcctttttgagcaatcgtgggctttatattccgagtccgcagctgggagacggatttattgcgtttatcctggctgttgttatggctatagtcctttctgttgggctattccgctttaataaaacataccagataaagaccggacaactgcgccgcacctggccgatcgccgcagtgttgatcattggtttgcctttactggcgcaatggctttttggcgcagcactacactgggatgtcccagccctacgaggctttaacttccgcggcgggatggttttaattcctgaactggcagccttaacgctggcacttagcgtttatacatctgcatttatcgccgagattatccgcgctgggatccaggcagtgccttatggtcaacatgaagcggctcggagtctgggattacccaacccggttacgctacgccaggtcattattccccaggcattgcgggtgattattccaccgttaaccagccagtatctcaacatcgtcaaaaactcctctcttgccgccgctattggctatcccgatatggttagcctgtttgccggcaccgtgctgaatcagacggggcaagccatcgagacgatagccatgaccatgagcgtctatctgattatcagcctgactatcagcctgctgatgaatatctataaccgccgcatcgcgatcgttgaacgctaaggagtcatgatgacaaaagtattgctgtctcatcccccgcgcccggcgagccataacagtagccgcgcgatggtgtgggtgcgaaaaaatctgttctccagctggagcaatagcctgctgactattggctgcatatggttgatgtgggaactgatcccaccgttgctgaactgggcatttttgcaggctaactgggttggcagtacgcgtgccgactgcacaaaagccggtgcctgttgggtcttcatccacgaacgatttggtcagtttatgtatgggctttacccacacgaccaacgctggcgaattaacctcgcattactgattgggcttgtgagcatcgcaccaatgttctggaaaatactcccgcatcgcggtcgctatattgcggcctgggcggtgatttacccactgattgtctggtggctgatgtatggcggtttttttgctcttgagcgggttgaaacccggcaatggggcgggctgacgctaactttaattattgcaagtgttgggattgcgggggcgctaccgtgggggatcttactggcgttaggtcgccgctcccatatgccgattgtgcgtatcttaagcgtcatttttatcgaattctggcgcggcgtgccgctgattaccgttctgtttatgtctagcgtcatgctgccgttgtttatggcagaaggcaccagtatcgacaaattgatccgcgcgctggttggcgtgatcctgtttcagagtgcatatgttgcggaagtcgtgcgaggtggattacaggcgctgcctaaagggcaatatgaagcggcagagagcctggcgttgggttactggaaaactcaggggctggttattctgccacaggcgttgaagctggtaattcctgggctggtaaataccatcatcgcactcttcaaagataccagcctggtgatcattatcgggttgttcgatcttttcagtagcgttcagcaggcaaccgttgatcccgcctggttgggtatgagcacggaagggtatgttttcgccgcgctgatctactggatcttctgtttcagcatgagccgctatagccagtatctggaaaaacgttttaacaccgggcgtacaccgcattgaggacactatgagccaaattttactgcaacctgctaacgcgatgattacgctggaaaacgtcaataaatggtatggacaattccatgttttgaaaaatataaatttaaccgtgcaaccgggagaacggatcgttctgtgtggccctagtggttccggtaaaagcacaaccattcgttgtattaatcatctggaagaacatcaacagggacggatcgtggtagatggcatcgaacttaatgaagatatccgcaatattgagcgcgtcaggcaggaagtgggaatggtctttcagcatttcaatctcttccctcatctgaccgttttacagaactgtaccctggcaccgatttgggtacgcaagatgcctaagaaagaggctgaagatctggcggtgcattacctagagcgggtgagaattgccgaacatgcgcataagtttcccggacagattagtggtggtcagcagcaacgcgttgccattgcgcgtagcctgtgtatgaagccgaaaattatgttgtttgatgagccaacgagcgcgctcgatcctgagatggtgaaagaggtgctggatacgatgattgggctggcgcagagcggtatgacaatgttgtgtgtaacacatgagatggggtttgcacgaaccgtcgctgaccgggtaatttttatggatcgtggggaaatagtggagcaagctgcacctgatgaattttttgcgcatcctaaaagtgagcgtacgagggcatttttaagccaggtaatccattaattgaatgttagttcgaaaagcaaaaaggccatcctttcggatggcctttcgcttgatttgatgtctggcagtttatggcgggcgtcctgcccgccaccctccgggccgttgcttcgcaacgttcaaatccgctcccggcggatttgtcctactcgggagagtgttcaccgacaaacaacagataaaacaaaaggcccagtcttccgactgagccttttgttttatttgatgtctggcagttccctactctcgcatggggagaccccacactaccatcggcgctacggcgtttcacttctgagttcggcatggggtcaggtgggaccaccgcgctactgccgccagacaaattcttttctaatctgccgaactttaacctaaaaagtggtgctgatacccagagtcgaactggggacctcacccttaccaagggtgcgctctaccaactgagccatatcagcacgctaaatttgatgcctggcagttccctactctcgcatggggagaccccacactaccatcggcgctacggcgtttcacttctgagttcggcatggggtcaggtgggaccaccgcgctacggccgccaggcaaattctgttttatcagaccgcttctgcgttctgatttaatctgtatcaggctgaaaatcttctctcatccgccaaaacagcttcggcgttgtaaggttaagcctcacggttcattagtaccggttagctcaacgcatcgctgcgcttacacacccggcctatcaacgtcgtcgtcttcaacgttccttcaggacccttaaagggtcagggagaactcatctcggggcaagtttcgtgcttagatgctttcagcacttatctcttccgcatttagctaccgggcagtgccattggcatgacaacccgaacaccagtgatgcgtccactccggtcctctcgtactaggagcagcccccctcagttctccagcgcccacggcagatagggaccgaactgtctcacgacgttctaaacccagctcgcgtaccactttaaatggcgaacagccatacccttgggacctacttcagccccaggatgtgatgagccgacatcgaggtgccaaacaccgccgtcgatatgaactcttgggcggtatcagcctgttatccccggagtaccttttatccgttgagcgatggcccttccattcagaaccaccggatcactatgacctgctttcgcacctgctcgcgccgtcacgctcgcagtcaagctggcttatgccattgcactaacctcctgatgtccgaccaggattagccaaccttcgtgctcctccgttactctttaggaggagaccgccccagtcaaactacccaccagacactgtccgcaacccggattacgggtcaacgttagaacatcaaacattaaagggtggtatttcaaggtcggctccatgcagactggcgtccacacttcaaagcctcccacctatcctacacatcaaggctcaatgttcagtgtcaagctatagtaaaggttcacggggtctttccgtcttgccgcgggtacactgcatcttcacagcgagttcaatttcactgagtctcgggtggagacagcctggccatcattacgccattcgtgcaggtcggaacttacccgacaaggaatttcgctaccttaggaccgttatagttacggccgccgtttaccggggcttcgatcaagagcttcgcttgcgctaaccccatcaattaaccttccggcaccgggcaggcgtcacaccgtatacgtccactttcgtgtttgcacagtgctgtgtttttaataaacagttgcagccagctggtatcttcgactgatttcagctccacgagcaagtcgcttcacctacatatcagcgtgccttctcccgaagttacggcaccattttgcctagttccttcacccgagttctctcaagcgccttggtattctctacctgaccacctgtgtcggtttggggtacgatttgatgttacctgatgcttagaggcttttcctggaagcagggcatttgttgcttcagcaccgtagtgcctcgtcatcacgcctcagccttgattttccggatttgcctggaaaaccagcctacacgcttaaaccgggacaaccgtcgcccggccaacatagccttctccgtccccccttcgcagtaacaccaagtacaggaatattaacctgtttcccatcgactacgcctttcggcctcgccttaggggtcgactcaccctgccccgattaacgttggacaggaacccttggtcttccggcgagcgggcttttcacccgctttatcgttacttatgtcagcattcgcacttctgatacctccagcatgcctcacagcacaccttcgcaggcttacagaacgctcccctacccaacaacgcataagcgtcgctgccgcagcttcggtgcatggtttagccccgttacatcttccgcgcaggccgactcgaccagtgagctattacgctttctttaaatgatggctgcttctaagccaacatcctggctgtctgggccttcccacatcgtttcccacttaaccatgactttgggaccttagctggcggtctgggttgtttccctcttcacgacggacgttagcacccgccgtgtgtctcccgtgataacattctccggtattcgcagtttgcatcgggttggtaagtcgggatgacccccttgccgaaacagtgctctacccccggagatgaattcacgaggcgctacctaaatagctttcggggagaaccagctatctcccggtttgattggcctttcacccccagccacaagtcatccgctaatttttcaacattagtcggttcggtcctccagttagtgttacccaaccttcaacctgcccatggctagatcaccgggtttcgggtctataccctgcaacttaacgcccagttaagactcggtttcccttcggctcccctattcggttaaccttgctacagaatataagtcgctgacccattatacaaaaggtacgcagtcacacgcctaagcgtgctcccactgcttgtacgtacacggtttcaggttctttttcactcccctcgccggggttcttttcgcctttccctcacggtactggttcactatcggtcagtcaggagtatttagccttggaggatggtccccccatattcagacaggataccacgtgtcccgccctactcatcgagctcacagcatgtgcatttttgtgtacggggctgtcaccctgtatcgcgcgcctttccagacgcttccactaacacacacactgattcaggctctgggctgctccccgttcgctcgccgctactgggggaatctcggttgatttcttttcctcggggtacttagatgtttcagttcccccggttcgcctcattaacctatggattcagttaatgatagtgtgtcgaaacacactgggtttccccattcggaaatcgccggttataacggttcatatcaccttaccgacgcttatcgcagattagcacgtccttcatcgcctctgactgccagggcatccaccgtgtacgcttagtcgcttaacctcacaacccgaagatgtttcacttcagagttgcgaaaatttgagagactcacgaacaactttcgttgttcagtgtttcaattttcagcttgatccagatttttaaagagcaaaacttcgcagtgaacctttgcaggtacactctgaagtattttttatttaatcactacagagatggtggagctatgcgggatcgaaccgcagacctcctgcgtgcaaagcaggcgctctcccagctgagctatagccccataacatgtagttaaaacctcttcaaatttgccgtgcaaatttggtaggcctgagtggacttgaaccaccgacctcacccttatcaggggtgcgctctaaccacctgagctacaagcctgtagaggttttactgctcattttcatcagacaatctgtgtgagcactgcaaagtacgcttctttaaggtaaggaggtgatccaaccgcaggttcccctacggttaccttgttacgacttcaccccagtcatgaatcacaaagtggtaagcgccctcccgaaggttaagctacctacttcttttgcaacccactcccatggtgtgacgggcggtgtgtacaaggcccgggaacgtattcaccgtggcattctgatccacgattactagcgattccgacttcatggagtcgagttgcagactccaatccggactacgacgcactttatgaggtccgcttgctctcgcgaggtcgcttctctttgtatgcgccattgtagcacgtgtgtagccctggtcgtaagggccatgatgacttgacgtcatccccaccttcctccagtttatcactggcagtctcctttgagttcccggccggaccgctggcaacaaaggataagggttgcgctcgttgcgggacttaacccaacatttcacaacacgagctgacgacagccatgcagcacctgtctcacggttcccgaaggcacattctcatctctgaaaacttccgtggatgtcaagaccaggtaaggttcttcgcgttgcatcgaattaaaccacatgctccaccgcttgtgcgggcccccgtcaattcatttgagttttaaccttgcggccgtactccccaggcggtcgacttaacgcgttagctccggaagccacgcctcaagggcacaacctccaagtcgacatcgtttacggcgtggactaccagggtatctaatcctgtttgctccccacgctttcgcacctgagcgtcagtcttcgtccagggggccgccttcgccaccggtattcctccagatctctacgcatttcaccgctacacctggaattctacccccctctacgagactcaagcttgccagtatcagatgcagttcccaggttgagcccggggatttcacatctgacttaacaaaccgcctgcgtgcgctttacgcccagtaattccgattaacgcttgcaccctccgtattaccgcggctgctggcacggagttagccggtgcttcttctgcgggtaacgtcaatgagcaaaggtattaactttactcccttcctccccgctgaaagtactttacaacccgaaggccttcttcatacacgcggcatggctgcatcaggcttgcgcccattgtgcaatattccccactgctgcctcccgtaggagtctggaccgtgtctcagttccagtgtggctggtcatcctctcagaccagctagggatcgtcgccttggtgagccgttaccccaccaacaagctaatcccatctgggcacatccgatgacaagaggcccgagggtccccctctttggtcttgcgacgttatgcggtattagctaccgtttccagtagttatccccctccatcaggcagtttcccagacattactcacccgtccgccactcgtcagcgaaacagcaagctgtttcctgttaccgttcgacttgcatgtgttaggcctgccgccagcgttcaatctgagccatgatcaaactcttcaatttaaaagtttgatgctcaaagaattaaacttcgtaatgaattacgtgttcactcttgagacttggtattcatttttcgtcttgcgacgttaagaatccgtatcttcgagtgcccacacagattgtctgataaattgttaaagagcagttgcgacgcggctttcagctcactgtcgcgaggtggcgtatattacgctttcctctttcagagtcaaccctgaatttcaggatttttttctcttcgttgttccgaccatcctgtgaagtgtttcacgttgtcgtctcaacggaggcgcattatagggatcccaattttttgcacaagtatttttttgatctttttttctgtttgttgttttttcaccctttttgctgcaatcgcacacaaaacggtgcttttttgcatactaaaagacttgcacaaggccaataatgcccccaaagtcattagtaaatcatttattgctgaggtaagtatgtctgatgttttacgcccataccgcgatctttttccacaaatcggtcagcgcgtaatgatcgacgatagcagtgtcgtgattggtgacgttcgtctggctgatgatgtggggatctggccgctcgttgtgattcgtggagatgtacattatgtacagatcggagcacgcaccaatatccaggatggcagtatgttgcatgtcactcataaatccagctacaacccagatggcaacccattaaccattggcgaagatgtcactgttggtcacaaggtgatgctccacggctgcaccattggcaatcgagttttggttgggatgggcagtattttacttgatggcgcaatagtagaagatgatgtgatgattggtgcgggtagtctggtcccacaaaataaacggctggagagcggatatctgtatctcggtagccccgtcaaacagatccgcccgttaagtgatgaagagaaggctgggttacgctattccgcgaataattacgtgaaatggaaggacgaatatctggatcagggtaaccagacccagccttgatcatcttcactttgttcctgaattaagttttccgcttcttcttccaggtcccagcgatgctgacgaaaactcgctaaccactgttctggcgtatctccagtaaagcgatacgccagactctcgccagagatcgcgcatgtcagttgcataccattcacgagagcgggaaaacatacacattttttattctcgtcccactcttccctgtccggaaactggatggcctgattcacgcggacaattcctcctgcaattgctttataactggttctacgtcaggcagaacaccgtgccagagaagaaaggcatgagccgcctgtgccaccagcattcctaaaccatcagcattacgcttactgcctcgctgctcacaccatgccagaaaaggagtttttcctttctgatagaacatgtcatagcaataaatgcctggatgaatgaggctactcgggatcgccggaatatcaccactgatgccactggatgttgcattaataatgagatcaaactcatgaccttccagttcgtccatactcaacgcctgaatactgccagtgtgcgcaaacaatttagccaactcttccgcgcgggataccgtccgattagttattgtcaccgcacagtccagggaaaggagtggcagtagtacgccgcgagatgctccaccagcgccgataagcagaatacgtaaaccagggcggataaaagacagacgttccagatcgcttaacaagcctacaccatcggtattgtcacccagcaggcgtccatcttctaaccgcatgagggtattaacagcaccagccaacgctgcccgttcagtaagctcatccgctctggcaaaagcctcttctttaaaaggcaccgtcacattcgcacctttaccaccagcactaaagaaagcgttcagtgtgttgatgaaatcattgatgggtgccaacacgcgcccatagggatgttcaatattcagttgctgagcaaattgctgatgaatgaatgggcttttgctgtgggctatcggattaccaaaaacagcataggtttccattatgttacccctgtcgaaacagttcacccgtcagggcatcgcggatttcactaggatttaaacgcccccccgtttcaccaggcacaaccgggaacgccgcgccaaattgtgcgcgaacttcgtctactgttcgacaaggtggcaatccactcaagttggcactggtagaaaccagcggtttaccataagcctggcacaaagcaaccaccaacggatggtcggtgactcgtacagcaaggctatcaaagcggcccgtcaaccagcgcggtgttgtcgcaggcgcgggaaagacaaaggtgacaggacctggccagcgggaaaaaatggtttcacgctgcacgtcagtcaacatggtgtcatcaatatagggtttaagctgctcgtaatttgctgcgattaaaatcagccccttatcaaccggacgctgttttaactccaacagtcgcatcactgctgtttcgctatcaggatcgcacccaacaccgaaaacggcttccgttggataggcgatgacacgttcttcattgagaacatctatcgcagctgcgatagcgtctctttgcaggttattattcacgttattattccgcgctaaccggctttccacattgtttactggcacaaaagtgttttacaccctgcgcggttttcttttcgatgagtagcggataatgacactcagggcattctccagctatgggtttgaagttaatggcaaattgacactccgggtagcgatcacaagagtgaaatgttttgccataacgggagcggcgctggaccagatggcccgtccgacattgggggcatgtaattgctgtttcgtccggtttatcgataagttcggtatgttcgcattcagggtagttaatgcaaccaataaacataccaaagcgtccctggcgtaataccagatttgcgccacatgcagggcaaacctgcccctccagaactttgacgatatgtccatccgcactagatttcagaggacggacgtagtcacacgccggatactgactgcatccaagaaacggaccgtgtttcccggatcgaataaccagttcagccccgcactttgggcaggactcattattacgcaccgtgaacagtgcacttttcgccataacaacttatgctgaattaaagaaatgattaatgcagcataccttcattcacttcaaagagtaattcttccatttgctggtacgcattttcgcagcccggaatattgaacaacaccatcaggatcacccatttcagatcatccagttcgaactctgcgttatccagcgcgagcactcgctctatcaccatttcacgagtttcaaggttgagcacctgaatctgctcaaggaaaagcagaaacccacggcagctggcatccagtcgttcacactcttccggtgtataaatacgcatggagagaggatcgctggccagttgcatcggttctgccaacccttcctgataatcagcaagtttttccagccatagcagggcattgtagatatcttctcgctcaaaacctgcgtcggtaagatcctgttcaagtttgtcttgatccacacgcaactcagcttctgtgtgaatataggtttcaaacaaatacattagtacgtcgaacatggcatgccctcctcaatcggacatagccgccgggtacagctgcgatccatcctgctaactccagttcgagtagttgagtaactacctctggcacaggttggccggcacgttcagcgacgacgtcaacaggtgttacctcatctcctacgttagccaggagctcaggaaatggcaatgccacgtcttgctgatctggactataaaaactattttcaggggcgtctggcaaccagtgcaatccaaattgcaagttttccagaatttcttccggttccgtcacaagaatcgcaccttgttttattaaccagtgaggcccttcgcttcccggattccctattggacctggcaaggcaaaaacttctcgcccctgctcaagcgcacaacgtgctgtcaccaggctaccactacgcaaagccgcttccaccaccagtacacctttacttagaccactgataatgcgatttcttcgtgggaaattgtaagcaaggggtggaacatcgaggggaaattcgctgacgagagcgcccccctgttcaagcagactggcagccagtcgggcatgacggcggggatgaatggtattaagtccattccccaatacagcaatgctgacgccatttacctgtaaggctgctttatgcgctacaccatcgattccacgcgccagtccactcgtaattgtcactccacgcgtcgccagagtttcgcaaaataatcgtccccatcgctcgccataccaactatgcgcccgactccccactacggcaagctgaaaactatgcagcgcgtgcagttctccttcaacaaacagtgcgccggggtaatctgtcgtcgccagaagttgaggaggataaaattcgctgtccgcaggaattaaatgatggttgggttgctccaaccaacaaagactgctttcgatactctttcgtggaaaactaagaaagcgttgtgcctgccgcaatgtaagccctgtttgctgcaatacaaccgcatcaatatggctctgttttgccacccagtgagcgatacggaccatatcatcgccgtacaagctgctgatactcattaaacgcagccaaatttctgtatcgaccatccttatctccctgccataagcagccttagcaatctttgcgattggtcagtgatgctgtcaatcagagggggatttgtctagaatagaagaaataatctttctaactcctgaacacatctctggagatttatgagcgttttgcaagtgttacatattccggacgagcggcttcgcaaagttgctaaaccggtagaagaagtgaatgcagaaattcagcgtatcgtcgatgatatgttcgagacgatgtacgcagaagaaggtattggcctggcggcaacccaggttgatatccatcaacgtatcattgttattgatgttagcgaaaaccgtgacgaacggctagtgttaatcaatccagagcttttagaaaaaagcggcgaaacaggcattgaagaaggttgcctgagcatccctgaacaacgtgctttagtgccgcgcgcagagaaagttaaaattcgcgcccttgaccgcgacggtaaaccatttgaactggaagcagacggtctgttagccatctgtattcagcatgagatggatcacctggtcggcaaactgtttatggattatctgagtccgctgaaacaacaacgtattcgtcagaaagttgaaaaactggatcgtctgaaagcccgggcttaaggataagaactaacgtgagtgaaagtctacgtattatttttgcgggtacacctgactttgcagcgcgtcatctcgacgcgctgttgtcttctggtcataacgtcgttggcgtgttcacccagccagaccgaccggcaggacgcggtaaaaaactgatgcccagcccggttaaagttctggctgaggaaaaaggtctgcccgtttttcaacctgtttccctgcgtccacaagaaaaccagcaactggtcgccgaactgcaggctgatgttatggtcgtcgtcgcctatggtttaattctgccgaaagcagtgctggagatgccgcgtcttggctgtatcaacgttcatggtagtctgctgccacgctggcgcggtgctgcaccaatccaacgcagtctatgggcgggtgatgcagaaactggtgtgaccattatgcaaatggatgtcggtttagacaccggtgatatgctctataagctctcctgcccgattactgcagaagataccagtggtacgctgtacgacaagctggcagagcttggcccacaagggcttatcaccacgttgaaacaactggcagacggcacggcgaaaccagaagttcaggacgaaactcttgtcacttacgccgagaagttgagtaaagaagaagcgcgtattgactggagtcttagcgcagcacagcttgaacgctgcattcgcgctttcaatccatggccaatgagctggctggaaattgaaggacagccggttaaagtctggaaagcaagcgtcattgatacggcaaccaacgctgcaccaggaacgatccttgaagccaacaaacaaggcattcaggttgcgactggtgatggcatcctgaacctgctcagcttacaacctgcgggtaagaaagcgatgagcgcgcaagacctcctgaactctcgtcgggaatggtttgttccgggcaaccgtctggtctgatagtccactcttctaagcccggtcttgccgggcgtttttatacttatgaaaaaacaacgtaatttacgtagcatggcggcccaggccgttgaacaagtcgtcgagcaagggcaaagtttaagcaacattctgccaccgctccagcaaaaagtttccgataaagacaaagcacttcttcaagagttgtgctttggcgtactgcgtacgcttagccagttagactggctgattaataagttaatggcccgtccgatgaccggcaaacagcggaccgtgcattacctgattatggttggtttgtatcaactgctttatacccgcattccacctcatgctgcgctggctgaaacggttgaaggcgctatcgcaattaagcgtccgcaacttaaagggttgataaacggtgtattacgccagttccagcgtcagcaagaagagttattagccgagtttaatgccagtgatgcacgttatctgcatccttcctggttgctgaagcgtctgcaaaaagcgtatccagagcagtggcaatccatcgtcgaagccaataaccagcgtccgccaatgtggctgcgtattaatcgtacgcatcattcccgcgacagctggcttgcattgctggatgaagcaggaatgaaaggtttcccgcatgcggattaccctgatgctgtacgtctggaaacacctgcacctgttcatgcgctacctggttttgaagacggatgggttaccgttcaggatgcaagtgcacaaggttgcatgacctggcttgcgccacaaaacggtgaacacattttggatctttgtgccgcccccggcggtaaaacaacgcatatccttgaggtggcaccagaagcgcaggttgttgcggttgatatcgacgaacagcgcctctctcgggtttacgacaatttaaaacgccttggtatgaaggcgaccgtgaaacaaggtgatggccgttacccttctcaatggtgtggcgagcaacagtttgatcgcattttattagatgcgccttgtagtgcaaccggtgtgattcgtcgccatccagatattaaatggttacgtcgcgatcgcgatatcccggaactcgcgcaattgcagtctgaaattctcgacgccatttggccgcatttaaaaaccggtggaactctggtctatgccacctgtagcgtgttaccggaagagaatagcctgcagattaaagcctttttgcaacgtaccgctgatgccgaactttgcgaaacaggaacaccagagcaaccgggtaaacaaaatctacctggtgccgaagagggcgacggcttcttttacgctaagctaatcaaaaagtgatgagataacgggtcgcgactgatgaaaattatcattctgggtgccggccaggttggcggcacactggcggaaaacctggttggcgagaacaacgatattactgttgtcgataccaacggtgagcgtctgcggaccttacaggataaatttgacctgcgggtcgtgcaggggcatggctctcatccacgcgtattgcgggaggcaggtgccgacgacgccgatatgctggttgctgtaaccagtagtgatgaaaccaatatggttgcctgccaggtagcctacagtcttttcaacacccctaatcgcatcgctcgtatccgcagtccagactacgtgcgcgatgccgataagctatttcatagtgatgctgtgccgattgatcatctgatcgcaccagagcagttggttatcgataatatttaccgactgattgagtatcccggcgcattgcaggtggtgaacttcgctgagggtaaagtcagcctggctgtggttaaagcctattatggcggcccgctgattggtaatgcacttagcaccatgcgcgaacatatgccacatatcgatactcgtgtggcagcaattttccgccacgatcgccccattcgtccgcaaggtagcaccattgttgaagctggtgatgaagtgttctttattgccgctagtcagcatatccgcgcggtgatgagtgaattacagcgactggaaaaaccgtataagcggatcatgctggttggtggcggtaatatcggtgcagggctggcgcgtcgtctggaaaaagattacagcgttaaactcatcgaacgtaatcagcagcgcgctgccgaactggcggaaaagttacagaatacgatcgtcttttttggtgatgcgagcgatcaagaactactggccgaagaacatatcgatcaagttgatctgtttattgccgtcaccaacgatgacgaggccaatatcatgtccgccatgcttgccaaacgtatgggtgcgaaaaaggtgatggtattgatccagcgtcgcgcttatgtggatctggttcaggggagcgttatcgatattgcgattagtccacaacaagcaactatttctgcgttgcttagccatgtgcgaaaagcagatattgttggtgtttccagtttgcgccgcggcgtagcagaagctattgaagccgttgctcacggtgatgaaagcaccagtcgcgttgtcggcagagtcattgacgaaatcaagctaccgccaggaacgattattggagcggtggtacgtggaaacgacgtgatgattgccaatgacaatctgcgcattgagcaaggcgatcacgtaattatgttcctcacagataaaaagtttattaccgacgtcgaaagactcttccagccaagccctttcttcttgtaattaataaggcgtctaatgacgccttattatttccctttgattatcaaggattaattaaattcattcctggcaggaaaatggcttaacatttgttagacttatggttgtcggcttcatagggagaataacatgagcattattaaagaatttcgcgaatttgcgatgcgcgggaacgtggtggatttggcggtgggtgtcattatcggtgcggcattcgggaagattgtctctagtctggttgccgatatcatcatgcctcctctgggcttattaattggcgggatcgattttaaacagtttgctgtcacgctacgcgatgcgcagggggatatccctgctgttgtgatgcattacggtgtcttcattcaaaacgtctttgattttctgattgtggcctttgccatctttatggcgattaagctaatcaacaaactgaatcggaaaaaagaagaaccagcagccgcacctgcaccaactaaagaagaagtattactgacagaaattcgtgatttgctgaaagagcagaataaccgctcttaacaagcgccactaagcagaagaccagtggtaaaaaagtgatttactttcttgccactggcctcccagttcccccgattgccatgttttccttttcgcatgtaactgcctttccccttcttatttttctctacgcgctgtcggaataagggatcatgtagtaatgcttctatcgcattatcctttatctgccctttagtatgctgatatcgactcataaaaactccagttggttatttaacggcgcgagtgtaatcctgccagtgcaaaaaatcaacaaccactcttaacgccactcgccccttgttcaagagcttcaagaatgctacaataaacactgctatgagcagtcccacaacaggcatcgttaaggcgttgcaaggaacgctgcatactctgcaactcggctatccgtgcttcgacttcctgcaatctttcctgcacaatgcctttactctcctgacaggtatggtgttcaggatcgatgcggatgctcagcaactcgcggatgctctccagactgaaacctagttgtctggcatggcggataaatttcaatcgctggagatcgctttcggtatataggcgaaacccaccttcagtacgcacttcatgctccatcatctgctgtttttcgtaataacgaatcgtgtcgggtgttacttccgccatttttgccagctcaccaatgcgatacatacatactccattagttatcgttgattttgtccaacaacttgtcagcataatcgccgcgtaaaaaatcggtactcaatccagcttgtcgcagcttcaattccagtaaactcaatcgacggctaacctcttgatattgcggatcatcgtgacggatacctttgagaatatccagaagctgaattgcttctctccgttgctcaagttctggcggtaagcaaccggcattcttcagcaagcgataccccgcacgtaattccggtggcacgtgagaatcatcatccagtatcaatggttcgccgctacctgccaggttatcaaactcacctttcgcttgcgcttctgctatatggcgctctgcccactggtcaagtaaccacataaatactccaggggatgaacaaaaagagtacagctattgtagataagtggggatactacgggtataaaaaaacccgccggggcgggtttttttacgttgcttcagattactctgcagcagcttctgctttctcactacgatcaaccagctcgatgtaagccatcggcgcgttgtcgcctgcacggaagccacacttcagaatacgagtgtaaccaccggcacggctcgcgaaacgcgggcccagttcgttaaacagttttgccacgatctcgttatcacgagtacgggtgaatgccagacgacgattagcaacgctatcagtcttggcaagagtaatcagcggctcaactacgcggcgcagctctttcgctttaggcagagtcgtcttgatgatttcatgacgaaccagactacctgccatattgcggaacatagcctggcgatggctgctgttgcggttcagttgacgaccactcttacgatggcgcatgaccttatccttctcagtaaaaccttaacctgtgattcggttactcgtcagcgatgcttgccggtggccagttttccaggcgcatgcccagagacagtccacgggaagccagcacgtctttaatctcagtaagagattttttaccaaggttaggcgttttaaggagctcaacctcggtacgctgtaccagatcaccgatatagtggatagcttctgctttaaggcagttagcagagcggacagtcaattccagatcgtcaacagggcgcagcaggatcggatcgaactctggtttctcttctttcacttcaggctgacgtacatcacgtaagtcaacgaaagcttccagttgttcagccagaatggttgccgcacgacgaatcgcctcttcaggatcgattgtgccgttggtttccatttcgatgaccagcttgtccaggtcggtacgctgttctacacgcgctgcttcaacattgtaggcaatacgctccacagggctgtagcatgcgtcgaccagcagacggccgattgggcgctcatcttcttcgctatgaattcgggtagaagccggcacataaccacgaccgcgctgaactttgatacgcatgctaatagacgcgttctcatcggtcaggtggcagatcacgtgctgcggcttgacgatttcgacatcaccgtcgtgggtgatatcggctgcagtcacagggccaatgccagatttattcaaggtaagaataacttcatctttgccctgaactctcaccgccagccctttcaggttgagcaggatttccaggatatcttcctgaacgccttctttggtgctgtactcatgtagtacaccatcaatctcaacctcggtcaccgcgcaacccggcatgctactgagcagaatacggcgcagtgcgttacccagagtatggccaaagccacgctctaaaggctcaagggtcaccttggcgtgcgtgctactcacttgctcgatatcaaccaggcgcggttttagaaactctgtcacagaaccctgcattgtgtcctctctttggtactaagctttacttggagtaaagctcgacgatcaggtgttcgttaatgtccgcagacagatcagaacgctccggcttacgcttaaacgtaccttccatcttgccagcatcaacttccagccaggttggcttttcacgctgctcagccagctccagagcggctttcacgcgagactgcttcttcgctttctcacgaatgcttacaacgtcattcggactaacctgataagaagcgatgttaacaacacgaccgtttaccataattgctttatggctaaccagctgacgtgcttctgcacgagtggcaccgaagcccatacggtatacaacgttgtccagacgaccttccagcagagccaacaggttttcaccggtgttgcctttcagacgtgctgcttctttgtagtagttacggaactgacgctccagcacaccatagatacggcgaactttttgcttttcacgcaactgcacaccatagtcagacagacgcggtttacgcgcaccgtgctggccaggagcttgttcaattttacacttggtatcgatcgcgcgaacgccagacttaaggaataagtcggtgccctcacgacggctcagcttgagcttaggacccaaatatcttgccattttctttctccaacaaacctggaaaacgaggcgttatacgcgacgttttttcggcggacgacaaccgttatgagggatcggagtcacatcagtaatgttagtgatgcggaaacctgcggcgttcagagcacgaatagtagattcgcggcctggacccggacctttaaccataacttccagattcttgatgccgtattctttcacggcgtcagcgcaacgctctgctgcaacctgagctgcaaacggagtggatttgcgagaaccacggaaaccggaaccaccggctgttgcccaacccaacgcgttaccctgacgatcagtgatagtcacgatggtgttgttgaaagaagcatggatatgagccacgccgtcagagacttgttttcttacacgtttacgtgcacgaattggtgcctttgccattattcaatcaccccgattatttcttgatcggtttgcgcggacccttacgggtacgtgcgttggtcttggtacgctgaccgcgaaccgggagaccacgacgatgacgcaaaccgcgatagcaaccaagatccatcaggcgcttgatgctcatgctgatttcacggcgcagatcaccttcaacgacaaatttggcaacttcgtcacgcagcgtgtcgatttgtccttcagacagctcactgatcttaacatcttcagcgatacccgctgcagccaggatggctttagaacgggtcttgccgacgccataaatgctagttaatgcgattacggcatgcttatgatcaggaatgttaatgcctgctatacgggccactatgcactcctactatttaatatgtacgttccatgctgaaaagcccgttttcaggatactcaaatggaaacgcacagacatacaaaagattggctggctaatctagccagctcaacccaactttgcaagaaaaatatgcgaaaaaatcagccttggcgctgtttatgcttcggctcggcactgcaaatcacacggatgacaccatcacgcttaacgattttgcagttacggcataatttcttgacggaagcacgaactttcatttttactctccgtaacttctcgggcgaccaattatcggccgtagcctttcaggttcgccttcttcaatgcagactcatactgactggacatcatcagagtttgcacttgagccataaagtccataatcacgacaacaacgataagcagactggtcccaccgaagtagaacggtactttcattgcatcacgcatgaactccgggatcaggcagataaaggtaatatacagcgcaccaaccagggtcaggcgggtcattactttatcgatatacttcgccgtttgctctcccggacgaattcctggtacaaatgcaccggacttcttcaggttatctgctgtttcacgcgggttgaaaaccaacgccgtgtagaagaaacagaagaagatgattgcagacgcatagagtaacacataaagcggttgcccaggctgcaaatacaggctaattgttgtcagccagttccaaccagtaccgcccccgaaccaactcgcgatggtcgccgggaacagaataatactggaagcgaagattgccgggattacccccgccatattcactttcagcggtaaatgtgtgctctgtgcagcatagacacgacgaccttgctgacgtttcgcgtagtttaccacaatgcggcgttgaccacgctcaacaaatacaacaaagaacgtcactgcaaatactaatactgcaaccaacagcaacacgaggaagtgcaggtcgccttgacgcgcttgctcgatagtatgggcaatggctggcgggagtcccgcgacaataccggcgaagataatgatactaataccgttgccgatacctcgttcagtaatctgttcgcccaaccacatcaggaacatggttcctgtgaccagacttacaacagcggtgaagtagaatgcaaagcccgggttaatcaccaggccttgcataccaggcatattcggcagaccggtagcaataccgatgctctggaatattgccagcaccagagtaccgtagcgggtgtactggctgatcttacgacgaccagactccccttctttcttaatttctgccaacgttgggtgaaccaccgtcagcagctggataatgatgctcgcgctaatatacggcatgatccccagagcaaagatagaagcacggctgagagcaccaccagagaacatgttaaacatctcaatgatggtgcctcgctgttgctcaagcagtttggcaagtacagcggcatcaataccagggatcggaataaaagagccaatacggaacacaatcagcgcaccgataacaaacagcagtctgcgtttcagctcgcctaagccacctttggcactttgaaaatctaatcccggttgtttagccatctgctacttattcctcgattttaccgccagcagcttcgatagcagcacgagcgcctttagtaacacgcaggccacgaacagttaccggagtcgttacttcgccagccaggatcactttcgcgaactcgatctggataccgataatgttagccgctttcagcgtgttcaggtctactacaccgccttctactttagccaggtcagacagacgaatttcggctgtaatcgctgctttacgagaagtgaagccgaatttcggcagacgacggtacagaggcatctgaccaccctcgaaaccgcgacgtacgccaccgccagaacgagacttctgacctttgtgaccacgaccaccggttttaccgaggccagaaccgataccacgacccaggcgtttacccgcctttttggagccttcggccggagacagagtatttaaacgcatctcttactcctcaactttaaccatgaaggaaaccgcgttgatcataccgcgaatagcaggagtatcctcgcgctctacggtgtgaccaatacgacgcagacccaggccaagcagcgttgccttgtgtttcggcagacgaccgattgcactgcgggtttgagtaattttaatagtctttgccatggtttatttccccagaatttcttcaacggatttaccacgcttggcagcgaccatttctggagaattcatattttccaggccatcaatagttgcacgaaccacgttgatcgggttggtggaaccataggctttagccagaacgttatgaaccccagcgacttccagaacggcgcgcattgcaccaccggcgatgataccggtaccttcggaagccggctgcatgaatacgcgagaacccgtgtgaacacctttaacagggtgttgcagagtgccgttattcagcgcgacgttaatcatattgcgacgggctttttccatcgctttctggatcgctgctggaacttcacgcgctttaccgtaaccaaaaccaacgcgaccgttaccatcgccaactacagtcagagctgtgaaggagaaaatacgaccacctttaacggttttagatacgcggtttaccgcgatcagcttttcctgcagttcgccagcttgtttttcgatgtgagccatcttacacctctaccttagaactgaaggccagcttcacgggcagcatctgccagtgcctggacacgaccatgatattggaacccggaacggtcaaaggatacatctttgatgcctttttccagagcgcgttcagcgacagctttacccacagctgcagccgcgtctttgttaccggtgtacttcagttgttcagcgatagctttttctacagtagaagcagctaccagaacttcagaaccgttcggtgcaattacctgtgcgtaaatgtgacgcggggtacgatgtaccaccaggcgagttgcgcccagctcctggagcttgcggcgtgcgcgggtcgcacgacggatacgagcagatttcttatccatagtgttaccttacttcttcttagcctctttggtacgcacgacttcgtcggcgtaacgaacacccttgcctttataaggctcaggacgacggtaggcgcgcagatccgctgcaacctggccgatcacctgcttatcagcgcctttcagcacgatttcagtctgagtcggacattcagcagtgatacccgcaggcagctgatggtcaacaggatgagagaaacccagagacaggttaatcacattgcctttaaccgctgcacggtaacctacaccaaccagctgcagcttcttagtgaagccttcggtaacaccgataaccatactgttcagcagggcacgcgcggtaccagcctgtgcccaaccgtctgcgtaaccatcacgcggaccgaaggtcagggtattatctgcatgtttaacttcaacagcatcgttgagagtacgagtcagctcgccgtttttacctttgatcgtaataacctgaccgttgatttttacgtcaacgccggcaggaacaacgaccggtgctttagcaacacgagacattttttcctccgattaggctacgtagcagataatttcgccaccaagaccagcctggcgcgctgcacgatcagtcataacacctttagaggtagaaacaactgcgatacccagacccgccataactttcggcagctcatctttacgtttatagatgcgcagacctgggcggctgacacgctgaatgctttctacaacagctttgccctggaaatacttcagagtaagttccagttcaggcttggtgtcgccttcaactttaaaatcttcaataaaaccttcttccttcagcacgttggcgattgccactttcagcttggaggaaggcatggtgaccgcagctttgttcgcggcctgaccgttacggatacgggtcagcatatccgcgatcggatcttgcatgctcatctgtctttactcccgtgattcaattggtgacaattaccagctagcctttttcagacccgggatttcaccgcgcatagcggcttcacggaccttaatacggctcaacccgaacttccgcaggaaaccatgcggacgacctgtttgacggcagcggttacgctgacgagacgggctggaatcacgcggcagagtctgcagcttgagaacagcgttccaacgatcttcgtcggaagcgttcacatcagagatgatcgctttcagttcagcgcgtttcgcgaagtatttatcagctaaagctacgcgttttacttcgcgtgctttcatactttgcttagccatttagtaaccctaccttacttgcggaacgggaagtcaaaggcagccagcagagcgcggccttcttcgtcagatttcgcagtagtggtaatggtaatatccaaaccacgaacgcggtcgactttatcgtagtcgatttctgggaagatgatctgctcacggacacccatgctgtagttaccacgaccgtcgaaagacttagcggacaggccacggaagtcacggatacgaggtacagcaatagtgatcaggcgctcaaagaactcccacatgcgttcgccacgcagagttactttacagccgatcggatagccctgacggattttgaagcctgcaacagatttgcgtgctttggtgatcagcggtttttgaccggagattgctgccaggtctgctgctgcgttatccagcagttttttgtcagcgatcgcttcaccaacacccatgttcagggtgatcttctcgacccgagggacttgcatgacagaattgtagttaaactcagtcatgagttttttaactacttcgtctttgtagtaatcatgcagtttcgccatcgtactactccaaattacttgatagtttcgctgttagacttgaagaaacggacttttttaccgtcttcgaatctaaagcctacacggtcagccttgccggttgccgcattgaagattgctacgttggaaacctgaatagcggcttctttttcaacgatgccacccggttggttcagggccggaaccggcttctgatgtttcttaaccaggttgataccttcaacaatgaccttgccggaagacaggacattcttaactttaccgcgtttacctttatctttaccggttaacacgataacttcgtcatcacgacggattttcgctgccatgattcgctccttagagtacttctggtgccagagagataattttcatgaacttctcactacgaagctcacgagttaccggcccaaaaatacgcgtaccgataggctgctcgctgttgttgttcagaagaacacaagcattaccatcgaagcgaatgacagaaccgtccgggcgacgaacacccttcttggtgcgcaccactaccgccttcagcacatcaccttttttgaccttaccacgcggaattgcttctttgatggtgatcttgatgatgtcgcctacgcctgcgtagcgacggtggctgccacccagaaccttgatacacattacgcgacgtgcaccggagttgtcggcgacgttcagcatagtctgttcttggatcattttagtgctccgctaatgtcaactactactgagacccgaaaatcaggtcgttaaaaatccccatatcgagggcgcggcattataacaccgcttcaaggatatgggtagaaaaaataaacggctcatttctgagccgtttattcgtattgagagagtgtactgtattacagaaccgctttctctacaacgcgaaccagcgtccaggatttagtcttggacagcggacggcattcgcggatttcaaccacgtcaccgataccgcattcgttgttctcgtcatgtacgtgcagtttggtcgtacgcttgatgaatttaccgtagatcgggtgtttcacaaaacgttcgatagcaacaacaatggatttctccattttgtcgctaacaacgcgaccttgcagagtacggattttatcggtcattacgcacccgccttctcgttcagtaaagtcttaacgcgtgcgacatcgcgacgcacttgcttcaacaggtgagactgttgcagctggccacttgcagcctgcatacgcaggttgaactgctcacgcagcaggttcagcagctcggtgttcagctcttcaacgctcttctcacgcagctcttttgctttcattacatcaccgtcttagttacaaaggtggttttaatcggcagtttcgctgctgccagcttgaatgcttcacgggccagctcttccggaacaccgtccatttcatacaggactttacccggctgaatcaaggcaacccaatactccacgttacctttacctttacccatacgcactgccagcggcttttcagtgatcggtttgtccgggaacacacggatccagatcttaccttgacgcttaactgcacgggtcatagcacgacgtgctgcttcgatctgacgggcagtcagacgaccacggccaacagctttcagaccgaagctgccgaagctaacatccgtaccctgcgccagaccgcggttacggcctttgtgcattttacggaattttgtacgctttggttgtaacatcagcgacgctccttatttacggcctttacgctgctgctttttaggctgagcagccggtttttccggttgttcaacagcagccataccacccaggatctcgcctttgaagatccacactttaacgccgattacaccgtaagtggtgtgcgcttcagaggtgttgtagtcgatgtcagcacgcagagtgtgcagcggtacgcgaccttcgcggtaccattcggtacgtgcgatttccgcgccgcccagacggccgctaacttcaactttaatacctttagcgcccagacgcattgcgttctgtacagcacgcttcatagcacgacggaacataacgcgacgttccagctgagaagtgatgctgtcagcaaccagttttgcgtccagttcaggcttacgaacttcggcgatgttgatctgtgcaggaacgccagcgatgtccgctacgaccttacgcagtttttctacgtcttcaccttttttaccgataacgatacccgggcgagcagtgtgaatggttacacggatgctcttagccggacgctcgataacgatacgagatacggacgctttagccagttccttagtcaggtactgacgtactttaaaatcgctgtccaggttgtcagcgaattctttggtgttcgcaaaccaggtagagttccatggttttacaatacccaggcgaataccattaggatgtactttctgacccattgctagtctccagagtctcagcgatcggacacaaccacagtgatgtggctggtgcgcttcaggatgcgatctgcacgaccttttgcacgcggcataatgcgcttcatgctcgggccttcgtctacgaaaattttcgtaactttcagatcgtcaatgtcagcgccatcgttgtgttcagcgttagcaatggcagattccagaactttcttgaccagtacagccgctttcttgttggtgtaggtcaaaatatccagagcctggctcactttcttaccgcgaatcaggtcagcaacaaggcgaaccttctgagcagaagaacgagcatggcgatgtttagcgatagtttccatctcttcctcctaccttatttcttcttcgcttttttatcagcagcgtggccgcgataagtacgagtcggtgcgaattcacccagtttgtgaccaaccatttcgtcggttacaaataccggaacgtgctgacgaccattatggacagcgatggtcaaaccgatcatgttaggaaagatcgtactacgacgggaccaagtgcgcaggggcttcttgtctccgctttccaccgctttctctaccttcttcagcaagtgcaggtcaataaaaggacctttcttgagagaacgtggcatggcttatcctctaaaattatttgctacggcgacgtacgatgaatttatcagtacgcttgttgctgcgggtcttcttacctttggtctgaacgccccacggagttaccgggtgcttaccaaagttacgaccttcaccaccaccatgtgggtggtctaccgggttcatcgcggtaccgcgaacggtcggacgaacaccacgccagcgtgcagcacctgctttacccagaacgcgcagcatatgctcagcattgccaacttcgcccagagttgcacggcagtctgcttctactttacgcatttcaccagaacgcagacgcagggtgacataagcaccatcacgagcaacgatctgaacgtaagtaccagcggaacgtgccagctgaccgcctttacctggtttcatttctacgttatgaacagtagaaccaaccgggatgttgcgcatcggcagggtgttacctggtttgattgcagcatcaacgccagactgaatctggtcgccagctttcaggcctttaggggccaggatgtaacggcgttcaccgtctttgtacagaaccagcgcgatgttcgcggaacggttcggatcgtactcaagacgttcaacaactgccgggataccgtctttgttgcgtttgaagtcaacaatacggtaagcctgcttgtggccaccaccgatatgacgagtggtgatacggccattgttgttacgaccaccggatttgctgtttttttccagcaacggagcaaaaggtttgcccttgtgcagctcagggttaaccactttaactacgtggcgacgacccggagatgtcggtttacatttaacaactgccattgtattactcctccgacttactcagcgccgccaacgaagtccagattctggccttctttcagggtgacgtaagcttttttccagtcgctacgacgaccgatacgctgtccgtgacgtttaactttccctttaactaccagggtgttaacgacttcgacttcgacttcaaacagtttctgcacagcagctttgatttctgctttggtcgcgtctttagcaactttgagtacgatggtgttggatttttccatcgcagtagacgctttttcagaaacgtgcggtgcacgcagcaccttcagcagacgttcttcacgaatcatgccagcatctcctcaacttgcttaacagcatcagcagtcattacgactttgtcgaaggcgatcaggctaaccgggtcgataccagttgcatcgcgtacgtcaaccttgtgcaggttgcgcgcagccaggaacaggttttcgtccagctcaccggtgatgatcagcacatcttccagagccatgtctttcagtttctgtgccagcagcttagttttcggcgcttctacagagaacttctcgacaacgatcagacgatcctgacgtaccagttcggacaggatgcttttcagcgcgccgcggtacatcttcttgttaactttttgactgtggtcctgcggacgagcagcaaaggtcacgccaccagaacgccagatcgggctcttgatagaaccagaacgcgcacggccggtgcctttctggcgccacggttttttaccggaaccagttacttcagcacgagtcttctgagcacgagtaccctgacgagcaccagctgcataagcaacaacaacctggtgaaccagcgcttcgttgaaatcacgaccgaaggtagtttcggaaacagtcagcgcgctctgcgcgtctttcaatactaattccattgctatctccttacgccttcacagctggtttaacgatcaggtcgctaccggttgcacccgggacagcacctttaaccagcagcaggttgcgctcagcgtcaacgcgtactacgtcaaggctctgaacggttacacgttcgttacccatctgacctgccattttcttgcctttgaacactttgcccggagtctggttctgaccgatagaacccggaacgcggtgagacaaggagttaccgtgagtagcgtcctgggtacggaagttccagcgcttaacggtacctgcgaaacctttacctttagaggtgccagttacgtcaacttttttaacgtcagcaaacagttcaacgctaatgctctgacctacagtgaactcttcgccttcagccaggcggaattcccacagaccacggccagcttctacgccagctttagcgaagtggccagcttcaggcttggtcacacggttagcttttttagcaccggtggtcacctgaatagcacggtagccatcgttagccaggtctttaacctgagtaacgcggtttgcttcaacttcgattacggttactgggatagaaacgccgtcttctgtgaagatacgggtcatacccacttttttaccgactaaaccaatcattgtttcaacctctcaatcgctcaatgacctgattaacccaggctgatctgcacgtctacaccggcagccagatccagacgcatcagagcatcaacggttttctcggttggctcaacgatgtcaaccagacgcaagtgagtacggatttcgtactgatcgcgcgcgtctttgttgacgtgcggggagatcagaacagtgaagcgctctttgcgtgtcggcagcgggatcggaccacggacctgcgcaccagtgcgcttggcagtctcgacgatttccgcggttgcttgatcgatcagacgatgatcaaacgctttcaggcggatacggattctttggttctgcatgagaccagagctccaattattttataaacgaaaatgattactcctcagacccattacgattgatgggagagtgtaaccgttcttacgtagctccccgattgggagcattgttaggtagccaaattcggctaactgaggttcagattgaacctgctgtcaactacgacaagcccgcgcattatacatacttaaccaccgaacgcaagcgtattgctagtaaagtaaacagccttcgggttatctctcaagttcgttcagtgcatttttgacacgctctcttaaaccggctttctcttcgctttcttccacagtattttcttcgtcttcagaagaagagggggcattctcaaccgcgacgcctgggtcatcttcctcctcgacggattcgacgacggggagtggctgttttttgaagaaatagtgttgtgtactttgtttaaaagcgggcgtttcagcctctacagtgacttcggcttttactatccaaagcacccatagctgcctggcatacccaccaaccagcaccattcctgcaaaccacaggcaaatcagtaataaacaaattacatatattatggtgctgtgtttttgtcgggagaagataccagggtgacctgtttctttctgctcacgcgcggcgatatagaattcaaacattataatcccttgtgacgtaaaaactgcaaaacaaaagtcctacgcaggaattatttacgttttacgagaacccttcaatatgaattaaattacggcattaaaaataagaaaaaagcctgacaaatgaagcattttaaaaacagaaacattcatatttaaaatgttaaattgaattgatattttaaatatgaataatttattcgttctgacagtacgaataagatatgccgtcaacaaatgcaaaaagggcgccgaagcgcccttttcaattcaaaactaattaacgtgtaattagcccagaactttagcaacaacgcccgcgccaacggtacggccgccttcacggattgcgaaacgcagaccgtcgtccatcgcgatcgggtggatcagggtaacaaccattttgatgttgtcgcccggcattaccatctctacgccttccggcagttcgatggtaccagtcacgtcagtagtacggaagtagaactgcggacggtagcctttgaagaacggagtatgacggccgccttcatctttggacagaatgtacacttcagattcgaacttggtgtgcggcttgatggtgcccggcttagccagtacctgaccacgttcgatttcttcacgtttgataccacgcagcagaacacctacgttctcaccagcacggccttcgtccagcagtttgcggaacatttcaacgccagtacaggtagacttctgagtctctttgataccaacgatttcaacttcttcaccaactttgatgataccgcgttctacacgaccggtaacaacggtaccacgaccggagatggagaatacgtcttcgatcggcagcaggaacggcttgtcaatcgcacgctctggttccggaatataagaatccaggaagccagccagttccaggattttcgcttcccactctgcgtcgccttccagcgctttcagagcagaaccacgaacgatcggagtgtcgtcgcccgggaagtcgtactgagacagaagttcacgaacttccatttcaaccagttccagcagctcttcgtcatcaaccatgtcgcatttgttcaggaacacgatgatgtacggaacgcctacctgacgacccagcaggatgtgctcacgagtctgcggcatcgggccgtcagtcgcagcaactaccaggatcgcgccgtccatctgagcagcaccggtgatcatgtttttaacatagtcggcgtgccccgggcagtctacgtgtgcgtagtgacgggtcggggtgtcgtattcaacgtgagaagtgttgatggtgataccacgagctttttcttccggcgcgttatcgatctggtcgaatgcacgagcagcaccgccgtaggttttagccagtacggtggtgattgcagcggtcagagtagttttaccgtggtcaacgtggccgatagtaccaacgttaacgtgcggttttgtacgttcaaatttttctttagacacggctatattccttactatagtgctctccccttcaggagagagcacgggactttggtattaacccttaggcttatttaccacgggcttcaattacggcctgagcaacgttactcggcgcttcatcatacttcaggaattccatagtgtaacttgcacgacctttggtcagagaacgcagctgagttgcgtatccgaacatttcagacagcggtacttcagcgtggatcttaacgccagtaacttcagattcctgacctttgagcataccacgacgacggctcaagtcaccgataacgtcaccggtgttctcttccggagtttctacttcaaccttcatgatcggctcaagcagaactggtttcgctttcttaaagccttctttaaaggcgatagaagcagccagtttaaacgccagttcagaggagtcaacgtcatggtaagaaccgaagtgcagacgaatacccatgtctactaccgggtagcctgccagcggacctgctttcagctgttcctggatacctttatcaacggccgggatgtattcgccagggattacaccacctttaatgtcgttgatgaactcgtagcctttcgggttactacccggctccagcgggtacatgtcgataacaacatgaccatactgaccacgaccaccagactgtttcgcgtgtttaccttcaacatcggtaactttctggcggatagtttcacggtaagcaacctgcggtttacctacgttcgcttcaacgttgaattcacgcttcatacggtcaacgatgatgtcgaggtgcagttcgcccatacccgcgatgatggtctggttagattcttcgtcagtccatacacggaaagacgggtcttctttagccagacggcccagagccagacccattttttcctggtcagctttggttttcggttcaactgcgatggagattaccggctcagggaattccatacgttccagaatgatcggcgcatccgggtcacacagggtgtcaccagtggttacgtctttcagaccgatagcagcagcgatgtcgcccgcgcgaacttctttgatctcttcacgtttgttagcgtgcatctgaacgatacgaccgaaacgctcacgtgcagctttcacggagttcagtacggtatcaccagagttaaccacaccggagtaaacacggaagaaggtcaggttaccaacaaacgggtcggtagcgattttgaacgccagtgcagagaacggctcgtcatcacttgcgtgacgttcagccggagtgtctttaccgtcgtccaggataccgttgatcgcaggtacgtcaaccggggatggcaggtaatcaattaccgcatccagcatcgcctgaacacctttgttcttgaacgcagaaccacaggttaccaggatgatttcgttgttcagaacgcgctgacgcagagcacctttgatttctgcttcagtcagttcttcaccacccaggtatttttccatcagctcttcagaagcttcagctgcggattcgatcaggttctggtgccattcgttagccagttcaaccatgtctgccgggatatcttcgtattcgaaggttacgccctggtcagcgtcgttccagttgatagctttcattttcaccaggtcaacaacaccggtgaaatgttcttcagcaccaatcgccagctgcagcggaaccgggttcgcgcccagacgggttttgatctggttaacaactttcaggaagttcgcacccatgcggtccattttgttaacgaacgcaatgcgcggaactttatatttgtttgcctgacgccatacggtttcagactgcggctgaacaccaccaactgcgcagtaaaccattaccgcaccatcgagaacacgcatggaacgttctacttcgattgtgaagtcaacgtgccccggggtgtcgatgatgttgatgcgatgcggctcatactgcttagccataccagaccagaatgcagtagtcgcagcggaagtgatggtaataccacgttcctgctcctgctccatccagtccatggttgcagcgccgtcatgaacttcaccgattttatggtttacaccggtgtagaacagaatacgttcggtagtagtggttttaccggcgtcgatgtgcgcactgataccgatgttacggtagcgtgcgatgggtgttgtacgagccatttgtttcctcgtttatcttttaggcgttcaatttaagtagcccaaagcgggctgcttactggaagcgcccgcctggtgactaaaactccgaagggataaccaacggtagtgtgcgaacgccttgttggcttcggccatacggtgaacgtcttcacgtttcttaactgcagtacctttgttttctgcagcatcagaaagttcgttcgccaggcgcagagccatggatttatcaccgcgtttacgagcagcttcaacgatccaacgcattgccagagcattacgacgaaccggacggacttcaactggtacctgataagtagaaccaccaacgcggcgagacttaacttctacagtcgggcgcacgttttcgagagctacttcgaatgcttccagttcagatttaccagagcgctgagccagggtctccagcgcgctgtatacgatagattcagcagtagattttttaccatctaccatcaggatatttacaaatttagccagcagttcacttccgaacttcggatccggcagaattttacgctgaccaatgacgcgacgacgtggcatggaaatactccgttgttaattcaggattgtccaaaactctacgagtttagtttgacatttaagttaaaacgtttggccttacttaacggagaaccattaagccttaggacgcttcacgccatacttggaacgagcctgcttacggtctttaacgccggagcagtcaagcgcaccacgtacggtgtggtaacgaacacccgggaggtctttaacacgaccgccacggatcaggatcacggagtgctcctgcaggttgtgaccttcaccaccgatgtaggaagtcacttcgaaaccgttagtcagacgaacacggcatactttacgcagcgcggagttcggtttacgaggagtggtagtatatacacgagtacatacgccacgtttttgcgggcatgcttccagcgcaggcacgttgcttttcgcaactttgcgagcacgtggtttgcgtaccagctggttaactgttgccattaaatagctcctggttttagcttttgcttcgtaaacacgtaataaaacgtcctcacacaatatgaggacgccgaattttagggcgatgccgaaaaggtgtcaagaaatatacaacgatcccgccatcaccaggccatctggctggggtgcttaaccgtaagtctgacgaaatcagtatagtcaatgagaatgatgtcgttgctaatttgaccagtcaaaccgcgggcaataaggtcttcgttcagggcatagaccttaatgggggcattacgcagactttcaaggtagcggttaccgtcaactgcggcagttacgccatcttgcaataatagcagttcgtctccttcactgagcagacgcagcagcgcagcaaaatccgtcagccagggactgcgatgtaatgtgtgcagcataaacgcctcaaaacctcaaaataacatcgtagttggcgagttcgcggcgtaaggcatctgcttcgagcggcgtggcttcgacaacaaagggtgtctgcggatctaacccgcgttcgcgcagactagccgcacaaacccagcactgttcaatgtcgtacagacccaacaatttaaaagtggcaatgtaatcacgcgccagcactgcatcgggcttttgtcctggcagcagctgaaaaacgccatcagctataaagaagacagccagatcgtcagttaatgcggaagttgccagtaaagcatctaaaccttcccggcctgcggctgtaccatgaggtgcagtagaaaaaacaaacgcaattcgtttcatcagaactgtaccaccctgtcacaggtcaggctggcttccgccagcgccccaagtccgcttaaggtaaatccctgctgaaggttactgctagccagccccagtcttccggcctccgtttcatcaacaacgccacggcgtaatgctgccgctacgcagatattcagcgccacaccatgttgcgcattcagttgttgccaggcccgtacgaggtcaaattcgtcacttgccggagaggtcaattggttagcgttatagaccccttcccgatagaaaaagacgctgcttaactcatggccatctgctatcagcgcctgcgcaaactgaaaagcactactcgcctgttgcgtaccgtatgctggcccggtcaccacgatggcaaaacgcattacttatcttgcccctggaaatcaccgctcttgaactggcggatgtagagatagacagtgtgtttggagatgttcaggcggtcagcaacctggttgatcgcatctttaatatcgaagatccctttctcgtagagattcagcacgatctgacgatttttggcgttattagaaacattgcgatcggcattcacttcttcgatggtgaactccagcgtttgggtaaccagatcttcaacagaagaggcaaagttgacgctactaccgacatccggggtttctggcggcacaaaggtgctcataatctggctgaagggaacatcaagattcatattgatgcacagcagaccaattacacgctgttcgcggttacgaatcgcgatagtcagggacttcattaatacgccgcttttggcgcgagtaaagtagcatttagaaacgctgctatccgctcccgtcatatcgtgcagcatacgtagcgccaggtcagtaattgggctaccaatcttccggcctgtatgttcaccgttagcaatgcgaatggcactacattttagatcctgcaaagagtgcaaaacgatttcacagtgggagccaataagcatcgctaacccgtccaccaccgcttcgtaggatttcagaatatcaaaatcggtctggtcgaaaggacgttgatccagtaaatccaactcactggtttcgttggttaaaaggctcctggacatgaaaaaaaacactccttttcaggagcctgtcgttaacttttcagggcaggctcattaatgatgcgggtaactaaattaatacagcggaggttccgctttccagcactaattatatccggcctgtaataaaaaaaccgccgcctggtcaggcggcggttcttaatgcttattttttagcagaatctgcggctttcgcatcagcttccggctttgcatcagccttcggcgctggtttcacatccagcagctctacgtcaaacaccagggtagaattcggtgggatccccggaacacccgctttgccgtaagccagttctggtggaataaccagtttgatcttaccgcctttcttgatgttcttcagaccttctgtccaacccgggataacaccgtccagacggaaagaaagcggttcaccacgggtgtaagagttgtcgaactctttaccgtcgatcagcgtacctttgtagttcactacaacagtatcgctgtctttcggtgcttcgcctttaccggcttctactacctgataaaccagaccagtactagaggttttcacacctttctctttggcaaatttctcgcggtactctttaccttttgcttcgttatcagccgcgtctttttccatcttcgcctgagcagaagacttcacgcgagcttcgaatgcttgtagagtctgttcgatctcttggtcggagagtttgcttttatcagcaaatgcatcctgaacaccagcgatcagctgatctttatccagtttgatgcccagtttttcttgttcttttagagagttttccatgtaacgacccaggctggcacccagtgcataagcacttttctgatcgtcatttttgaacgctgctttgctgtcagcagctgtagcaggttttgcagcttcagcagcaaaagtgattggtgcatgcagggcaacggccattgtggtcgccagcagcgttactttaaacagacttttcatccatatctccaggatcggggcatctcaccccagggttaactattatcagaagggtactataaagcgttgtcgaacaaatctacatacagacacgccctattatcatctattttcagactctttttgtttaaattagtttcgatgaccgcgaaatgagtgctgtctcgggcagcaaagttaagtagaatccgcggcgaccattcgacaaaagaggtgaatcatgcaggatttaagtttggaagcacgcctggcagagctggagagccgactggcttttcaggaaatcaccattgaagaactgaacgtcacggtgaccgctcatgaaatggagatggcgaaactgcgcgatcatctgcgtctgctgaccgagaagttaaaagccagccagccgagcaacatcgcgagccaggctgaagaaacgccaccgccacattattgaggcgtaaaaaaagcggggattccccgcttttttgtcactttttcggtattagtggcaaccgcaaccgccgttgcctttaccgccacagcagccttcgccaccgtgttcatgaccgtgatcgtggccatgaccgccgcagcaaccgtcgtggtcgtgatcgtggtggtgatcgtgcgcgccgtgaacgtgaccatgagccagttcttcttcagtcgcttcgcgaatcgccacaacttcaacgttgaatttcaggttctgaccggccagcatgtggttaccatcaaccacgacgtgatcgtcttcaaccgcagtgatttcaaccggtaccggaccctggtcggtttcagccaggaaacgcatacctacctgcagttcatcaacgcccataaatacgtctttaggaacacgttgcaccaggttttcgtcgtactgaccgtaagcgtcgttcgcgccaacagcgacatcaaatttgtcgccaacttcatgaccttccagcgccgtttccaggccagagatcagggaaccgtgaccatgcaggtagtccagcggcgcactcaccggagactcatcaaccaacacaccgtcttctgtacgtacctgataggccaggctgaccaccaggtcttttgctactttcatgatatctcctgagcatgggaagaatagtggcgcagattgtagcggaattctgcagccgtgtactcactagcttaaaaaaactcggcgcatatcgttagtccggatgaaaaatcccgatcacttgctcatctttgcgaacgtgatcgcgggcttctttgtctgcttctcgcatctgatgtccgcacttaacacattcaacaatatcaatattattttcgcgccacatcgccatactatcctgcgcctgacaggccgggcattttgcgcccgcaataaaacgttttcggattgccatctttaccctttactcaaattcatcccagccgtccagctggcgtcgttcttgttgcatttcacgctggaaaatctcttccagttcgcgtcgggcttccctggcgcgagaaatttgtacggtatcggcatgcattgggatgagctctcgcagcatccgcatatccaggcggcgaaaatgcagttgcgctcgctgtgcctgatgcggatgcatgccaagcgtgaccagcgtcttgcgccccagctctaacgcactggagaatgtttcacgggaaaactgcgtcacccctgcctgtaataactcatgcgcttccacacgtccgcgcgctcgcgcaagaatatgcaaatgcggaaagtgctgttggcatatttccaccagcttcatggtgtcttccggctcgttacaggtaatgacgatagactcagcggcctctgcacccgcagaacgtaaaagatcgacctgcgtggcgtcgccgtaataaactttgtagccgtatttacgcatcaggttaacggcgctgatatcccgctccagcacggtaatgcgcattttatttgccatcagcaaacgaccaatcacctgaccaaaacgcccgaagcccacgacaatgacctggggtttatcatcgttgacccacggtttttcgtcttcttcttccggtccgttaaactggcgggatagccatttatccaccagcttcatcagcaacggcgtggtcatcatggaaagcgtcaccgtcaccagcaacaacgccatctggtcgccctggaataagcgttgactagaagcggtagaaaagaggacaaaggcaaactcaccactctgactcaacacgccagcaaactgcatccgctcactgctacgcacgccatacaatcgcgccagcagatacagcacgagaattttcaccgccaccagcacaaccacgcttatcactacccacaacagatgggtataaagcaccccgaggttgagactcatgccgacagagataaagaacaaaccgagcagcaagcctttgaagggatcgatagccgtttccagttcatggcgatattcactttccgccagcagcacgcccgcaataaatgtaccgagcgccatgctcagccccagcgcatccataaacaatgcggaacccaacaccagcagcagcgtcgcggcggtgaacacttcccgcacgccagaagctgcaataaagcggaataccggacgcagtaaatagcgcccaccaatcagcatgccgacaaacgccagcaccttcatgccgaccttcatccagtcgaaatgttcgtctgcgctccccgccaacaacggcactaacgccagtgctgggattactgccagatcctgaaacagcagaacgctaaacccgagctggccggattcgctgcgattcatccctttctcacgcatcaattgcaacgccattgcagtactagacatcgcaaggccaatgccaccgaccaccgccgcctgccaggcgaaatccgtcagcatcaataatcccgccagcaacgccgcgcttaacagcacctgtgccgcgcctacgccaaaaatgctacgccgcagttgccaaagtttggagggattcaactcaaggccgatgataaacatcaggaataccacgccgagttcgctaaagtggaggatctcatcgacgtcgctaataaaccccagcccccacgggccaattgcaatccctgccagcaaatatcccaacacagcgccaatacccagccggcttgccagcggcaccgcagccaccgccgcgaagagaaacagcactcctgcgagtaaaaaatcggaaccttccatcagcggcctcctggagacagcggatttgccagccagtcaccgtaggctctggcgtggctcgccagctcctgtgcgctttgccgtctcgcccagtaaataatgatgggacttaaccaatgcatccggcacatgcccgccgccagttcaaaggggcgcagcacatcgctcatcgggtagcgattcagcgcgtcataacggtaagcactttccggctcgccggtggtaatcacgctacgccagtactttcccgccagttggtttcctcccggcccgctggcaaaaccacgacttaatacccggtccagccactctttcagtagcgccgggcagctataggtataaagaggatgctgaaagacaatcacctcgtgctcgcgcagtaatgcctgctcacgggggatatcaataaaaaaatcgggatagtgcgcgtaaaggtcgtgcacggtaacattgctgagctgcgtggccggtttaagcagtacccggtttgccacgctgtcctgagattccggatgggcatacagcagcaaaactttcgctggctgagacatcatccccctcccggtatggtttttgtgtatagtcgctgttttgggctaccattgcgcccggtgcggcagctcgcccatacattacattatcataatgataagttaacatagtctgaacatacggcaccttatgattgttttctccagcttacaaattcgtcgcggcgtgcgcgtcctgctggataatgccaccgccaccatcaaccctgggcagaaagtcggcctggtgggtaaaaacggctgtggtaaatctaccctgctggcattgctgaaaaatgaaatcagcgccgacggcggcagctacacctttccgggaagctggcaactggcgtgggtgaatcaggaaacgccggcgttaccgcaagcggcgctggaatatgtcattgacggcgaccgtgaatatcgtcaactagaagcgcagctacacgacgccaacgaacgtaacgacgggcacgccattgcgaccattcatggcaagctggatgctattgacgcatggagtattcgctcccgtgctgccagcctgctgcacggcctcggtttcagcaatgaacaactggagcgcccggtaagtgatttttccgggggctggcgtatgcgtcttaaccttgcccaggcgctgatttgccgtagtgacttgctgctgctcgacgaaccgactaaccacctcgatctcgatgccgttatctggctggaaaaatggctgaagagctatcagggcacgctgatcctgatctctcacgaccgcgacttcctcgatccgatcgtcgataaaattattcatatcgaacaacaaagcatgttcgagtacaccggcaactacagtagctttgaagtacagcgcgccacccgtctggcgcagcaacaagcgatgtacgaaagccagcaggaacgcgtagcgcatctgcaaagttatatcgaccgtttccgtgccaaagccaccaaagcgaagcaggcccagagccgcattaagatgctcgagcgtatggagctaattgcccccgcgcacgtcgacaacccgttccgctttagcttccgcgcgccggaaagcctgccaaatccgttactgaagatggaaaaagtcagcgcgggctatggcgatcgcattattctcgacagcattaaactgaacctggtgcccggcagccgtattggtctgttaggccgcaatggcgcgggtaaaagcacattaatcaaactgttagccggtgaacttgcgccagtcagcggtgaaattggtctggcgaaagggatcaaactcggctacttcgcccagcatcaacttgaatacctgcgcgccgacgaaagtcctattcaacatctggcacgtttagcgccgcaggagctggaacaaaaactgcgtgactacctcggcggctttggtttccagggcgataaagtaaccgaagaaacgcgccgcttctccggtggggaaaaagcccgcctggtgctggcattaattgtctggcagcggccgaatctgctgctgctcgacgaaccgactaaccaccttgacctcgacatgcgtcaggcactcaccgaagcattaatcgagtttgaaggcgcgctggttgtcgttagccacgaccgtcatttgctgcgttccaccactgacgatctctacctggttcacgatcgtaaagtcgaaccgttcgacggcgatctggaagattatcaacagtggttgagcgacgtacaaaagcaggaaaaccagaccgacgaagcgccaaaagagaatgcgaacagcgcccaggcacgtaaagatcagaagcgtcgggaagctgagctgcgtgcgcaaacccagccactgcgtaaagagattgcccgtctggaaaaagagatggagaagctgaacgcgcaactggcgcaggcggaagagaaactcggcgacagcgaactgtatgaccagagccgtaaagcggagttgaccgcctgcctgcaacagcaagccagcgccaaatccggcctggaagagtgcgaaatggcatggctggaagcccaggagcagcttgagcagatgctgctggaaggccaaagcaactgatggcgcagataacgacgaccgatgccaatgaattcagcagcagtgctgaattcatccccatgcgcggctttagcaattgtcatctgcaaaccatgctgccgcgtctgtttcgtcgtcaggtgaaattcaccccgtactggcagcggctggagttgcccgacggcgattttgtcgatcttgcgtggagtgaaaaccctgcacaggcgcaacataaacctcgtctggtggtgtttcacgggctggaaggcagtctcaacagcccttacgcccacggtctggttgaggcggcgcaaaagcgcggctggctgggcgtggtgatgcattttcgcggatgcagcggtgaaccaaaccgtatgcaccgcatttaccatagcggcgaaaccgaagacgccagttggtttttacgctggctgcaacgcgaatttggtcatgcgccaacggctgccgtcggctatagcctcggcggtaatatgctggcctgtttgctggcaaaggaaggcaatgatctcccggttgatgcggcggtgattgtctctgcgccgtttatgctggaagcctgtagctatcatatggaaaagggcttttcccgcgtttatcagcgttacttgctgaacctgttaaaagccaatgccgcgcgcaagctggcagcctaccccggaacgctgccgattaatctcgcgcagttaaaaagcgtacgtcgcatccgtgaatttgacgatctcatcaccgccagaattcacggctacgccgacgctatcgactattatcgtcagtgtagcgccatgccgatgctgaaccggatcgccaaaccgacgctgattattcacgccaaagacgatccgtttatggatcatcaggtgatcccgaaaccggaaagtctccccccgcaggtggagtatcaactgactgaacatggcggtcatgttggctttattggcggtacattacttcatccgcaaatgtggctggagagtcgcattcctgactggttaacaacgtatctggaggcgaaaagttgttgatattaacgtatctggaggcgaaatcatgttgattccgtggcaagacctctcccccgaaacgctggaaaatttaattgaaagctttgtgttacgtgaaggcaccgattatggtgaacatgagcgtacacttgaacagaaagtcgccgacgtcaaacgccagctacagtgcggagaagcggtgctggtatggagcgagctgcacgaaacggtcaatattatgccgcgcagtcagtttcgcgaataacctgcaaccgtcggcggacgagataataatgatagctaagtcatggagttactatgtctgccaaacatccggtcattgcggtaacaggatccagcggcgcggggaccaccaccaccagcctcgcgtttcgtaaaatattcgcgcagttaaatctgcatgcagctgaggtggaaggcgacagttttcaccgttacacccgcccggaaatggacatggcgatccgcaaagcgcgcgacgccgggcggcatatcagctacttcggccccgaggctaacgacttcggcctgctggaacaaaccttcattgaatacggtcagagcggcaaagggaaatctcgcaaatatctgcatacctacgacgaagccgtaccgtggaatcaggtaccggggacattcaccccctggcaacctttaccggaacccactgatgtactgttttatgaaggtttacacggcggcgtagtcacgccacagcataacgttgcgcagcatgtggacttactggtcggcgtggtgcctatcgttaaccttgagtggattcaaaaactgatccgcgacaccagcgagcgcgggcacagtcgagaagcagtgatggacagtgtagtgcgtagtatggaagactatatcaactacatcacaccgcagttttcccgcacccatcttaacttccagcgcgttcccaccgtcgacactagtaacccgttcgcggcaaaaggtatcccgagcctcgatgaaagctttgtggtgatccattttcgtaatctggaagggatcgatttcccctggctgctggcgatgttgcaaggcagtttcatttcccacatcaatacgttagtggtaccgggcggcaaaatgggtctggcaatggaattaattatgctgccgctggtgcaacgattgatggaaggaaagaaaatcgagtaactctgctattacgccggataaaatactatccggcttcacaacgggatagttaagtcacgcggcaaccacttcatagctgtgagtaatattcaccgctttttccagcatcaacgccacactacaatatttctcggcagagagatcaaccgcacgcgcaaccgctgcgtctttcaggtcgcgaccggtgacgataaaatgcagattaatgtgcgtaaacaggcgtggtgcctcttcgcggcgttcagaggtcaattttacttcacaatcgaccacatcctgacgccctttttgcaggatgctaaccacatcgatggcactgcaaccacccgccgccatcaacaccatttccatcggacttggtgctttatcgccactgttgccgtccattaaaatctgatgaccagaggcggattcgcccagaaaagttaacccttcgacccacttcactcgcgcttgcatttttgctactccactgcgtcaattttcctgacagagtacgcgtactaaccaaatcgcgcaacggaaggcgacctgggtcatgctgaagcgagacaccaggagacacaaagcgaaagctatgctaaaacagtcaggatgctacagtaatacattgatgtactgcatgtatgcaaaggacgtcacattaccgtgcagtacagttgatagccccttcccaggtagcgggaagcatatttcggcaatccagagacagcggcgttatctggctctggagaaagcttataacagaggataaccgcgcatggtgcttggcaaaccgcaaacagacccgactctcgaatggttcttgtctcattgccacattcataagtacccatccaagagcacgcttattcaccagggtgaaaaagcggaaacgctgtactacatcgttaaaggctctgtggcagtgctgatcaaagacgaagagggtaaagaaatgatcctctcctatctgaatcagggtgattttattggcgaactgggcctgtttgaagagggccaggaacgtagcgcatgggtacgtgcgaaaaccgcctgtgaagtggctgaaattagctacaaaaaatttcgccaattgattcaggtaaacccggacattctgatgcgtttgtctgcacagatggcgcgtcgtctgcaagtcactagtgagaaagtgggcaacctggcgttcctcgacgtgacgggccgcattgcacagactctgctgaatctggcaaaacaaccagacgctatgactcacccggacggtatgcaaatcaaaattacccgtcaggaaattggtcagattgtcggctgttctcgtgaaaccgtgggacgcattctgaagatgctggaagatcagaacctgatctccgcacacggtaaaaccatcgtcgtttacggcactcgttaatcccgtcggagtggcgcgttacctggtagcgcgccattttgtttcccccgatgtggcgcagactgatttatcaccccgatatcaactatgcacttcgacaaacgctggtgctatgtttgcccgtggccgttgggttaatgcttggcgaattacgattcggtctgctcttctccctcgttcctgcctgttgcaatattgcgggccttgatacgcctcataaacgttttttcaaacgcttaatcattggtgcgagcctgtttgccacctgtagcttgctgacacagctactactggcaaaagatgttcccctgccctttttgctgaccggattaacgctggtacttggcgtcactgctgagctggggccattgcacgcaaaattgcttcctgcaagcctgctcgccgccatttttaccctcagtttggcgggatacatgccggtctgggaaccgttgctcatctatgcgttgggcactctctggtacggattgtttaactggttttggttctggatctggcgcgaacaaccgctgcgcgagagtctaagtctgctgtaccgtgaactggcagattattgtgaagccaaatacagcctgcttacccagcacaccgaccctgaaaaagcgctgccgccgctgctggtgcgccagcaaaaagcggtcgatctaattacccagtgctatcagcaaatgcatatgctttccgcgcaaaataatactgactacaagcggatgctgcgtattttccaggaggcgctggatttacaggaacatattagcgtcagtttgcatcagccggaagaggtgcaaaagctggtcgagcgtagccatgcggaagaagttatccgctggaatgcgcaaaccgtcgccgctcgcctgcgcgtgctggctgatgacattctttaccatcgcctgccaacgcgttttacgatggaaaagcaaattggcgcactggaaaaaatcgcccgccagcatccggataatccggttgggcaattctgctactggcatttcagccgcatcgcccgcgtgctgcgcacccaaaaaccgctctatgcccgtgacttactggccgataaacagcggcgaatgccattacttccggcgctgaaaagttatctgagtctaaagtctccggcgctacgcaatgccggacgactcagtgtgatgttaagcgttgccagcctgatgggcaccgcgctgcatctgccgaagagctactggatcctgatgacggtattgctggtgacacaaaatggctatggcgcaacccgtctgaggattgtgaatcgctccgtgggaaccgtggtcgggttaatcattgcgggcgtggcgctgcactttaaaattcccgaaggttacaccctgacgttgatgctgattaccaccctcgccagctacctgatattgcgcaaaaactacggctgggcgacggtcggttttactattaccgcagtgtataccctgcaactattgtggttgaacggcgagcaatacatccttccgcgtcttatcgataccattattggttgtttaattgctttcggcggtactgtctggctgtggccgcagtggcagagcgggttattgcgtaaaaacgcccatgatgctttagaagcctatcaggaagcgattcgcttgattcttagcgaggatccgcaacctacgccactggcctggcagcgaatgcgggtaaatcaggcacataacactctgtataacagtttgaatcaggcgatgcaggaaccggcgtttaacagccattatctggcagatatgaaactgtgggtaacgcacagccagtttattgttgagcatattaatgccatgaccacgctggcgcgggaacaccgggcattgccacctgaactggcacaagagtatttacagtcttgtgaaatcgccattcagcgttgtcagcagcgactggagtatgacgaaccgggtagttctggcgatgccaatatcatggatgcgccggagatgcagccgcacgaaggcgcggcaggtacgctggagcagcatttacagcgggttattggtcatctgaacaccatgcacaccattagcagcatggcatggcgtcagcgaccgcatcacgggatttggctgagtcgcaagttgcgggatagcaaggcgtaatgcaggctaaaccatcggataaggcattcacgccgcatccgacatcttttgcctgatgcttcgtatttacgccccaaccaccttcgccaccgcgtgggcgaaacgttgcatcccttcatcgatatccgcatcttccaccaccaggctcggtgcaaaacgcatcacatccggtccggcattcagcaccattacgccagcctctgcgcccgcatacaggaaatcacgcgcccgacctttgtactgtggtttcagctctgcgccaatcaacagccccataccgcgaatatcgctaaatacatcgtactgctgatcgatcttctgcagatggtcaacaaaacgctggcgtttcgcctgaatgccttccagcacttcaggggtattgatgatatcaaacgccgcccccgctactgcacaggccagaggattaccgccgtaggtggaaccgtgagaaccaggatgaaacgcagaagcaatttccgccgtggtcagcatggcgctaatcgggaagccgccgcctaacgctttcgcagaggtcagaatatccggcgtaacgccgtagtgcatgtaagcaaacaaatcgccggtccgccccatcccgcactgcacttcatcaaacaccaataatgcctgatgttgatcgcacagctcgcgcaagccctgcaaaaactctggcgtcgctgccgtcacaccgccctcgccctggatcggctcaaccaccaccgcacaggtgtgatcatccatcaccgctttcactgcatggagatcgttaaagggaacgtggatgatgtctgccggtttcggcccaaagccgtcggaatattttggctgcccacccacgctaacggtaaacaggctgcgaccatgaaaagcgttatggaaggcaataattttggttttgaacgggctatgacgcacacaggcgtaatggcgtgccagtttaaaggcggtttcgttagcttccgtgccggagttcataaacaccacgcgttcggcaaacgttgcctcaatcagtttacgcccaagacgcagcgccggttcattggtgaaaacgttactgatatgccacagagtttcgccctgggtttttaacgcgttcaccagcgcaggatggcaatggcccaacgccgtaactgcaatgccacccgcgaaatcgacatactccttgccttgctgatcccagattcggctgccctgaccttttaccggaataaactctgccggagcataaatcggcaggatcacttcatcgaaagtcgcgcgtgtaattgctgtttgttcaattgccatctcatgatcaccctgttacgcataaacaaatgtgaaattataaccacaaaatatgcataaaaaatcactaaatggcaatcagaaatcagcgatgcaggaaattagccagcagttgatgtccttgttcgctaagaatactttctggatggaactgcacaccttccagatcccactggcgatggcgaatccccataatctctcgggtttcgctccaggccgtcacgtcaaagcacgctggtaaactgtcaggttccaccaccaggctatggtagcgtgtcacggtaagtggatttgccagcccccgaaatacgccctcaccgttatgtgtaatcgggctggttttgccgtgcatgacctttgcggcgcgcacaactttaccgccaaatgcctgcgccattgcctgatgaccgaggcagacgccaagaatcggcaagcgcccggcatagtggcgaataacgtcaagggagatcccggcttcatctggcgtacaggggccaggactgatgacaattttttgtggtttaagggcgtcgatatccgccagcgtcaacgcatcgttgcgcttaaccagcacatccgcccccagttcacaaaagtactggtagaggttccaggtaaaagaatcgtagttatctataagcaggatcatggcggctccggtacaaaagaaccgcgctattttactcagattccccggcttcgcttaccactttgctaaatatcatctgcagtgcggtgagatcccccattgccccactctgatttgcctgattccaggcctctttttcgataccctgccagctcagttgatatccggcatgaatcgccagttgctcgaagaagatccgctgtgccagaccacttcccacccggaagggatgcagcacgttgatttcacaatagtaatgcgccagccgctcgacgaacttcgctttctccaggccaaccagataaccttcttcctccagatcctgcatcagggcattgccctctttttcgatataagcaaagtggcagaacggcgtatcaccctgataaatatcaacttcacgcagttgccctgcccagtcgaaaatatcctgatacagctggcgatggatagttcgcaaatgcggtaaaccgcgcaccagcggaccaagctcaatggtcgcagcacgcagcgccgtcatttcgtaagcggcctgttccagccgctgctgctggcggatgttcagccggttacgcatgatatcaaggcctggataaagatacggatcgcgcccttcgccgaatttatcgctcatagtgactcctcagctcttcaaggcgcgctaaagcctctgcggcagtaagagtgactaaaggcatctcgacgccttcaagacggcgactggcctgaaaattacgattacgctgaagctcccagagacgggacttttgcttatcggtgagtttcttcacttgatgcctccctgaacgtgtccatttgccacaagtataagcggcaaatccgggttacgccgggagagcagaagcgcgggcaagattgcccgcgcgagaaatcattacggcaggactttagcggaaaggataactaccggtttactcggcacattctggtacggaccaacgtcatgagtcggcacctgggaaatcttatcggcaacgtccatgcctttcaccactttaccaaataccgcgtaaccgaaatcacgctgaccatggtcaaggaaggcgttatcggcaacgttgataaagaactggctggtggcgctgtctttgtcagcggtacgtgccatcgcgatggtgccacgcgtgttgcgcaggccgttatcggcttcatttttgattggcgggtttggttttttctgctgcatctgctcggtgaaaccgccgccctgaatcataaagccaggaatgacgcggtgaaaggtagtgttgttataaaaaccgctgttcacataatcgacaaagttttgcacagacactggcgctttttgtttatccagctccagttcgatgttaccagcactggttgtcaacaatacgtgcgggtcccctttcgctgccattgctgcgggagaaagagcagaaagagcgaaaacagcagccatcgccgccagggtgcttttgaacatgagatttccttaacaaacagagcagaaaaaaagcaagtgaagagattctaaatagccttcaagaacaaggccatccctttacctaattttacgtatctgaaatatatgtaacctgacgatcactttttattccgtgatcaaaatcacctcttaaaatgcaatttagcaaccgattgcaataaaacatttaaacagatcacaaaatcacctaaaatcgcccgctcgcggcatatcccgctatgccattttatttttgaacgcaggccaatcatgactaacagcaatcgcatcaagctcacatggattagctttctctcctacgcactgactggtgcgttggttattgtcaccgggatggtgatgggaaatatcgccgattatttcaatctgcctgtttccagtatgagtaataccttcaccttcctcaacgccggcattttaatctctatcttcctcaacgcctggctgatggaaatcgtcccgttgaaaacgcagttacgttttggctttctcctgatggtgctggcggttgccggtttgatgttcagccacagcctggcgctgttcagcgcggcgatgttcattctcggggtggtcagcggcatcaccatgagcattggtacattcctggtaacacaaatgtatgaagggcgtcagcgcggttcccgcctgttatttaccgactccttcttcagtatggctgggatgattttcccaatgatcgccgcgtttctactggcgcgcagcattgagtggtactgggtttatgcctgcatcgggctggtgtatgtcgctatttttattctgaccttcggctgtgagttcccggcgctgggcaaacatgcgccaaaaacggatgctccggtagagaaagaaaagtgggggatcggcgtactgtttctctctgttgcggcgttgtgctacatcctcggtcagttaggttttatctcctgggtgcctgagtatgccaaaggcctgggcatgagcctgaacgacgcgggcacgctggtgagtaacttctggatgagttacatggtcggcatgtgggcgttcagctttattcttcgcttctttgatttgcaacgcattctgaccgtactggctggtctggctgcgattctgatgtacgtctttaacaccggaacaccagcacatatggcgtggagtattctcgctctgggcttcttctccagcgcgatctataccaccatcatcaccctgggtagtcagcagaccaaagtaccgagcccaaaactggttaactttgtcctgacctgcggaaccatcggtactatgttgacctttgtggttaccggcccgatcgttgaacatagcggtccgcaggcggcactgcttacagcaaacggtctgtacgctgtcgtctttgtgatgtgcttcctgttaggtttcgtcagccgtcaccgtcagcataacaccctgacctctcattaattgctcatgccggacggcactatcgtcgtccggccttttcctctcttcccccgctacgtgcatctatttctataaacccgctcattttgtctattttttgcacaaacatgaaatatcagacaattccgtgacttaagaaaatttatacaaatcagcaatatacccattaaggagtatataaaggtgaatttgatttacatcaataagcggggttgctgaatcgttaaggtaggcggtaatagaaaagaaatcgaggcaaaaatgagcaaagtcagactcgcaattatcggtaacggtatggtcggccatcgctttatcgaagatcttcttgataaatctgatgcggccaactttgatattaccgttttctgtgaagaaccgcgcatcgcttatgaccgcgtacacctcagctcttacttctctcaccacaccgccgaagagctgagcctggtgcgcgaaggcttctacgagaaacacggcatcaaagttctggtcggcgaacgcgctatcaccatcaaccgtcaggagaaggtgattcactccagcgccggacgtaccgttttttatgacaagctgatcatggcaaccggttcctacccgtggatcccgccaatcaaaggttctgatactcaggactgctttgtctatcgcactattgaagacctcaacgccattgaatcctgcgcccgtcgcagcaaacgcggtgccgttgttggtggcggcctgttaggtctggaagccgcaggcgcgctgaaaaacttaggtattgaaacccacgttatcgaatttgcccctatgctgatggcagaacagcttgatcagatgggcggcgagcagctgcgtcgcaaaatcgaaagtatgggcgtgcgcgttcacaccagcaaaaacacccttgagattgtgcaggaaggtgttgaagcgcgtaaaaccatgcgttttgccgacggcagcgaactggaagtcgactttatcgtcttctctaccggtatccgtccgcgcgataagctggcaacccagtgtggtctggacgttgctccgcgtgggggtattgtcattaatgattcctgccagacttccgatccggatatctacgccatcggtgaatgcgcaagctggaacaaccgtgtatttggtctggtagcacctggctacaaaatggcgcaggtcgccgttgaccatattctcggtagcgaaaacgcctttgaaggtgctgaccttagcgccaagctgaaactgctgggcgtagacgtaggcggtattggtgatgcgcacggtcgcacgcctggcgcacgtagctacgtttacctcgacgaaagtaaagagatctacaaacgcctgattgtcagcgaagacaacaaaaccctgctcggtgcggtactggtgggcgataccagcgactacggtaacctgctgcaactggtgctgaacgctatcgaactgccggaaaacccggattccctgatcctgccagcacacagcggtagcggcaagccgtctatcggtgttgataaactgccggacagcgcgcaaatctgctcctgcttcgacgtcaccaaaggtgatctgattgctgccatcaacaaaggctgccacacagttgcggcgctgaaagctgaaaccaaagcgggtactggctgcggtggctgtatcccgctggtcactcaggtactgaacgcggaactggcgaaacagggcatcgaagttaacaacaacctgtgcgaacactttgcttatagccgtcaggaactgttccatttgatccgcgttgaaggcattaaaaccttcgaagaactgctggcgaaacacggcaaaggctacggttgtgaagtttgtaaaccaaccgtcggtagcctgctggcctcctgctggaacgaatacattctgaagccggaacatactccgctgcaggattctaacgacaacttcctcgctaacatccagaaagacggcacctacagcgtgatcccgcgttctccgggcggtgaaatcaccccggaagggctgatggcggtaggtcgtatcgcgcgtgaatttaatctctacaccaagatcactggctcccagcgtctggcgatgtttggcgcacagaaagacgatctgccggagatctggcgtcagctgattgaagccggcttcgaaaccggtcatgcctatgcgaaagcactgcgtatggcgaaaacctgcgtgggtagcacctggtgccgctacggcgttggcgacagcgtcggcctcggcgtggaactggaaaaccgctacaaaggcatccgtacgccgcacaaaatgaagttcggtgtctccggctgtacccgtgaatgtagtgaagctcagggtaaagacgtgggtattatcgccactgaaaaaggctggaacctgtatgtttgcggtaacggcggcatgaaaccgcgtcatgcggatctgctggcggcggatatcgatcgcgaaacgctgatcaaatatctcgaccgcttcatgatgttctacatccgtactgccgacaaactgacgcgtaccgcaccgtggttagaaaacctcgaaggcggcatcgattacctgaaagcagtgatcattgacgacaaactggggctgaacgcacatctggaagaagagatggcgcgcctgcgtgaagcggtactgtgtgagtggactgaaacggtcaatacgccgtctgcgcagactcgcttcaaacacttcatcaacagcgacaagcgtgacccgaacgtgcagatggtgccagagcgcgaacagcaccgtccggcaacgccgtatgaacgtatcccagtaactctggtggaggacaacgcatgagccagtggaaagacatctgcaaaatcgatgacatcctgcctgaaaccggcgtctgcgcgctgttaggtgacgagcaggtcgcgattttccgcccgtatcacagcgatcaggtgtttgcgatcagcaacatcgacccgttcttcgagtccagcgtgctgagtcgcggactgattgcggaacaccagggcgagctgtgggtcgccagcccgctgaaaaaacagcgttttcgcttaagcgacggcttgtgcatggaagacgaacagttttccgtcaaacattacgaagcgcgagtgaaagacggcgtggtgcagctgcgcggttaatgttttaacgggaggcgcaatgcctcccctttttgcatggtcctgtaataatcttcggtatattgcaggacattttttaaactttttgttttattttttgtttttattttttaaaggataatcaaatgtttacagacactattaataagtgtgcggctaacgctgcgcgcattgcacgcctgagcgcaaataacccgctcggcttttgggtcagctccgccatggcgggcgcgtatgtgggtcttgggatcatcctgattttcacgctcggtaatttgctcgatccatccgtacgccctttggtgatgggcgcgacctttggtatcgccttaacgctggtgattatcgccggttctgaactgttcaccggacacaccatgttcctcacctttggggtaaaagcgggcagcatcagccacgggcaaatgtgggcaatcctgccgcaaacctggctgggtaacctggtcggttccgtcttcgttgccatgctctatagctggggcggcggtagcctgctgccggtagataccagcatcgttcactccgtcgcgctggctaaaaccactgcaccggcaatggtactcttcttcaaaggtgcattgtgtaactggctggtttgcctggcaatctggatggcgctgcgcactgaaggggcggcgaaatttatcgctatctggtggtgtctgctggcatttatcgcgtccggctacgagcactctatcgctaacatgacgctgttcgcgctctcctggttcggcaaccacagcgaagcctacacgctggcgggtattggtcataacctgctgtgggtgacgctgggtaatactttaagtggtgccgtattcatgggattgggttattggtatgctacgccgaaagcgaatcgtccggttgcggacaaatttaatcaaactgaaacggctgccggttaattactaaggggtttttacgtggatcatttgcctatattttgccaattacgcgatcgcgactgtctgattgtcggcggtggtgatgtcgcggaacgcaaagcaaggttgctgttagacgcaggcgctcgcttaacggtgaatgcattagcgtttattccacagttcaccgcatgggcagatgcaggcatgttaaccctcgtcgaagggccatttgatgaaagccttctcgacacctgctggctggcgattgcagcgacggatgatgacgcgcttaaccagcgcgtcagcgaagccgctgaagctcgtcgcatcttctgtaacgtggtcgatgcgccgaaagccgccagctttattatgccgagcattattgaccgcagtccgctcatggtagcggtctcctctggcggcacctctccggttctgacacgcctgttgcgcgaaaaacttgaaagtctgctgccgttacatctgggccaggtagcgaaatacgccgggcaattacgcgggcgagtgaaacaacagttcgccacgatgggtgagcgtcgccgtttctgggagaaattgttcgttaacgaccgcctggcgcagagcctggcaaacaacgatcagaaagccattactgaaacgaccgaacagttaatcaacgaaccgctcgaccatcgcggtgaagtggtgctggttggtgcaggtccgggcgatgccgggctgctgacactgaaaggactgcaacaaattcagcaggcagatgtggtggtctacgaccgtctggtttctgacgatattatgaatctggtacgccgcgatgcggaccgtgttttcgtcggcaaacgcgcgggataccactgcgtaccccaggaagagattaaccagatcctgctgcgggaagcgcaaaaaggcaaacgcgtggtgcggctgaaaggtggcgatccgtttatttttggccgtggtggcgaagagctggaaacactgtgcaacgcgggtattccgttcagcgtggttccgggtattaccgcagcttctggttgctctgcctatagcggtattccactcacgcatcgcgattatgcccagagcgtacgcttaattaccggacacttaaaaaccggtggcgagctggactgggaaaacctggcggcagaaaaacagacgctggtgttctatatggggttgaatcaggccgcgactattcagcaaaagctgattgaacacggaatgccaggcgaaatgccggtggcaattgtcgaaaacggtacggcagtcacgcagcgcgtgattgacggtacgctcacacagctgggagaactggcgcagcaaatgaacagtccaagcctaattattattggtcgggttgttggcctgcgcgataaactgaactggttctccaaccattaatttaacccgggccagagaattctggccttcttaatgactctttttatatattcagcaaataaaacatagccccttaataaatattatctgctaatgggttatattcaccgttacagcgacttacaaaattaagtcattcgctcactgacgccaattaaatattcctgtatcgttcttaacgagcagtctgcttatattcatataatcaatgaatattaattaatatataatacatagggaatgtaaatgaacaaatttattaaagttgcactggtaggtgcagtactggctacgttaactgcatgtactggtcatattgaaaaccgtgataagaactgctcttacgactacctgctgcacccggcaatttctatttctaaaatcattggcggttgcggtcctactgcacagtaagtctctgacagaaatcggctaacaccggtttaattgcccgacgccctctggattttccgagggcgtatttgtttctatgtccttcttgcccccgcccgtaaaaatattttcactttaaattcaatttgataactacatccattagccacagcgcgatcctgtgcgaaattttgtgatcttcctccacattacataacatcatatgttgttatattcatcatgcattgtcatgttaccttttaaatgactgcaaactctcccctacaacgtattggacaagaaaaaggtatcgctatgggaagccaggaactccaacgcaagctcggattttgggccgttcttgcaatcgccgtcgggacaaccgtcggctccggtatttttgtatctgtgggtgaagtggcaaaagcagcgggcacgccgtggcttacggtgctcgcgtttgtcattggcgggttaattgtgatcccgcaaatgtgcgtctatgcggaactatccaccgcttatccggaaaatggcgcagattatgtttatctgaaaaatgccggaagccgaccgctggctttcctctccggctgggccagcttctgggccaacgatgcgccgagtttgagcattatggcgctggcgattgtcagcaatcttggctttttaacgcctatcgatccgttgctcggtaaatttatcgccgccggattaattatcgcctttatgttgctacacctgcgctccgttgaaggcggcgcagcgtttcagacgctaattaccatcgccaaaattatcccgttcactatcgtcattggccttgggatcttctggtttaaagcggagaattttgccgcccctaccaccactgcgattggcgcaacgggcagctttatggcgctgctggcggggatctctgccaccagttggagctataccggcatggcctctatctgttatatgaccggcgaaattaaaaaccccggaaaaaccatgccacgagcgctgattggttcctgtctgctggttctggtgctctacaccctgctggcgctggtgatttccggcctgatgcccttcgacaaactcgccaattctgaaacgccgatttccgacgccctgacctggatccccgcactcggcagcaccgctgggatctttgttgccatcacggcgatgatcgtcattcttggtagcctttccagctgcgtgatgtaccagccgcggctggaatacgcgatggcgaaagacaacctgttctttaaatgcttcggccatgtgcatccgaaatacaacacgccggatgtctccatcatcctgcaaggggcgctggggatcttcttcatcttcgtttccgatctcaccagcctgctgggttatttcaccctggtgatgtgtttcaaaaataccctcaccttcggctccatcatctggtgtcgtaaacgcgacgattacaaaccgctgtggcgtactccggctttcgggctgatgaccaccctcgccattgcgagtagcctcattctggtcgccagtacctttgtctgggcaccgattcccggccttatctgcgccgtcatcgttattgctactggtctgcctgcttacgccttctgggcgaagcgtagccgccagctcaacgctttgagctaatgttatctggagaaaataaaatgttggatattgataaaagcaccgtggactttctggtcaccgaaaatatggttcaggaagtggaaaaagttctcagccatgacgttccgctggtgcacgccatcgtggaagagatggtgaagcgcgacattgatcgtatttatttcgttgcctgcggaagcccactcaacgcggcgcaaacggcgaaacatctggcggatcgcttttccgatcttcaggtctacgccatttccggctgggagttctgcgataacaccccgtatcgcctcgacgatcgttgcgcagtaattggcgtttctgactacggtaaaaccgaagaggtaatcaaagcgctggagctgggccgggcctgcggcgcactcactgcggcgttcaccaaacgcgcggatagcccgattaccagcgcggcggaatttagcattgattatcaggccgactgtatctgggaaattcacctgccgctctgctacagcgtggtgctggagatgatcacccgcctcgcgccgaacgcggaaatcggcaagatcaaaaacgatctcaagcagttgccgaatgcgctcggtcatctggtacgcacctgggaagaaaaaggccgccagcttggtgaactggccagccagtggccgatgatttataccgttgctgcgggtccgctgcgtccgctgggttacaaagaaggcattgtaacgctgatggaatttacctggacgcacggctgcgtgattgagagcggagagttccgccatggcccgctggagattgtcgaaccgggcgttccgttcctgttcctgctcggcaatgatgaaagtcgccacaccaccgaacgcgccattaactttgttaaacagcgtactgacaacgtgatcgtcatcgattacgccgaaattagccaagggctgcacccgtggctggcaccgttcctgatgttcgtgccaatggagtggctctgctactacctgtctatttacaaagatcacaacccggatgaacgccgctattacggtggtctggtggaatattaatccctctcccggcccggcaacgggccggatttacgcaaggagttacccgatgaaaacaggtatgtttacctgcggccaccagcggctgcctattgaacacgcatttcgtgatgcaagcgagctgggttacgacggcatcgaaatttggggcggtcgcccgcacgcgttcgcgccggacttaaaagcgggcggcatcaaacaaatcaaggcgctggcgcagacgtatcagatgccgattatcggctatacgccagaaaccaacggctatccgtataacatgatgctgggcgatgaacatatgcgtcgcgaaagcctcgacatgatcaagctggcgatggatatggcaaaagagatgaacgcgggttatacgctgatttccgcggcccacgcgggctatctcacgccacctaatgttatctggggacggctggcagagaacctaagcgaactgtgtgagtacgcggaaaacatcggcatggatctaatcctcgaaccgttaacgccgtatgaaagcaacgtcgtgtgtaatgctaatgatgtgcttcatgcgctggcgctggtgcctagcccgcgcctgttcagcatggtcgacatttgcgcgccgtatgtccaggcggaaccggtgatgagttatttcgacaaactgggcgataaattacgtcatctgcatattgtcgacagcgacggggccagcgacacgcattacattcctggagaaggcaaaatgccgctgcgggaactgatgcgcgatattattgagcggggctatgagggttactgtacggtggagctggtgacgatgtatatgaacgagcccagactctatgcccgccaggcgctggaacgctttcgcgcgctgctgccggaggatgagagatgaaaaccctggcgacaatcggcgataactgcgtcgatatctacccgcaactgaataaagcgttttctggcggtaatgcggtcaatgtggcggtgtactgcactcgctacggcatacagccgggatgcattacctgggtgggtgacgatgactacggcacaaagctgaagcaggatctcgcccgcatgggcgtcgatatcagccatgtccatacgaaacacggcgttaccgcacaaactcaggtggaactgcacgacaatgatcgcgtttttggcgactacaccgaaggcgtgatggccgactttgccctgagtgaagaggattacgcctggctggcgcagtatgacattgtgcacgcggcaatctggggacatgcggaagacgcattcccacagctgcacgctgcgggcaaacttaccgctttcgacttctccgacaagtgggacagcccgctctggcagacactggtgccgcatctcgattttgcctttgcctccgcaccgcaagaagacgaaacgctgcgtctgaagatgaaagcgattgttgcccgtggcgcaggaacagtgattgtcacgctgggtgaaaacggcagcattgcctgggatggcgcgcagttctggcgtcaggctcctgaaccggtgacggttatcgacaccatgggtgccggagatagcttcattgccggattcctttgcggctggtctgcggggatgacattaccgcaggcgatagcgcagggaacggcgtgcgcggcgaaaaccattcagtaccacggtgcctggtaagtataacgttggcgtgagcatcttcacgccaacgtgctgttacttgccggaaaacgaccctataatccgagtaattcattctttatttcagggtcgattatgagtgctacggaccgctactctcatcaactcctctacgctaccgtccgccagcgactgctggatgatatcgcgcagggggtttaccaggcgggcaacagatccctaccgaaaacgagctttgtacacaatataacgtcagccgcattaccattcgcaaagccatcagcgacttagtggcagacggcgtactgatccgctggcagggaaaaggcacctttgtacaaagccagaaagttgaaaacgccctgcttactgtcagtggttttaccgattttggcgtcagtcaaggcaaggcgacgaaagagaaagtgatcgaacaggaacgggtcagcgccgcgccgttttgcgaaaagctgaacatccccggaaacagcgaagtgttccatctctgccgggtgatgtatctcgataaagagccgctgtttattgatagtagttggatcccgctgagccgttatcctgactttgatgagatttacgtcgaaggaagctccacctatcagttatttcaggagcgttttgacacgcgagtggtcagcgacaaaaagaccatcgatatctttgccgccacccgcccgcaggcaaaatggctgaaatgcgaactgggcgaaccgttgtttcgcatcagcaaaatcgcctttgatcagaatgacaaaccggtgcacgtctccgaactcttctgccgcgccaatcgcatcaccttaactattgataataaaagacattaaccgtaggccggataagatgcgccagcatcgcatccggcgatgctggcgcgttgaattttacatcccgtacgttcccctcaccctaaccctctccccaaaggggcgaggggaccgttcagtacggaatttagcttgacggtgctatccagcattaaatactggcaatactctcacgcaaaatccgcagcaccgtctcttcaccgctgcgattcgggttaatgcgaatcgcacaatgttcactttgtggattcgcctggcgaaacgttccggaaaggcgataaaagagcggcgggatttcatatttgctctctgcacccaccgggtaaggcaaggcaccgcgcttttgcgcctcttccagcactctggcggcaatcggctgatgaaactcgacaatcaacaccttgctctgcgcattagcaatcaccgcgcttttcacttccggcaccgcaccaccgttaagcaaagccagcaaccgttcagatacccctgcctgcaccgcgtgcatcactggcgcaaacaccagaccacgcaatacttccagcgcctgtgcgccctggatctggctaccgccggagtaaagcgtggcgcgaatacggttgataacatcagcatcgccgaccactgcaccaacaccctctggcccaaatagcttgaagcaggaaaatgtgctgacattcgcgccgcattcacagccgattcgagccaccttcatcaccgcatagttgtcatcggttaacgctggaacacctgccgcgcgcaacgttgccagcacatctgccagcacgtagctgtcctgcggctgctggcgcgtatgctgcaccagcgccgcatccggttgttgctcgtcgacgacctgcttcagtgcgctcaggtcattgaaatcaacagtaataagcgtcagccccatctgctcaataataacccgtgtcgtcgggtaaacaggcgcgtcatgcaccagaagacgctgccccggtttgagcaaagccgccagcccggcgcgaatcgcgccagtccccgcgtcctgcaccagcgccgcagcctgtgcgtgaaatgcatcagccagcacctgttccacacgctgggtaacgcgcggttgattcagtcctggcgttaagcctaaatcaccgccagtaagaaactcgctgccggggaaatggcgacaaatgctatccaccagcgcaaactgcttttgctgcgcctcaataatcgtcaggctttgcagaggaaacgtcttcataggtgccttccttaagccggaacgaacaggccaagccagtaaagaacattcagcagaataccggtgatcattactgccacgaccggtgccgccattttctgtaccggacggcccagggattcgttgaggaagtaaatggcaaccgcgatagagaatccggtataacccgccatcttaattgctgcgaaaatgctaccgaccagcagcgccacttccatcagcatattcatggcgttacggatgttatcgctcgcattacgcacgctcgggtagcgtcccagccatttgccgatgctacgaagcagcaagacttccgcgctaataaccactgcgcctaataccgctgcaaccatcggattcgggctgagatagtccaccgcataaacaaaggtaaagcccgcaactgcatacacacccgttgctaacgcggtggtggcaatcaacggcacaaaccccagtccgcgcataaattctgccagagccgcctgattaatcagcgtttggctttgttccggcgttacgcctgcggaatatgctttctccagtgtgaagatgctcacttcactgccagcaaaaatcttcatgctggcaacggcggcaatcaatgctcccacgatggcgatatagggtaagtttttgataatccgactcgtgcgttcttcaaacacgctaagcccgctggcatcaatgtcattttcatcacgatgacgcaggtcgtgagttatcgcgatccccagcagcatcaccatgccaataaagatttcgatggattcagggttaagatgtgggaaatagcgcacgactaccacacgggtcatcagtaccaccacggcggcgatcagactttgcttccagccaaactggtagaaaatcgccaccagcgggaacagtgcaaaagcactaaccaccgggctgcttaattcccccaggctacctaatacatccaccggcagcgcggtcagcagctggtttactggcaacaggcaagtaaggatcaacacgccccagatagcgccaagaccaaacgccatcaggctgtttatcgccaggacgccgaggatatcggtaggaagaaagagtaaccatgcgttgagcagcccggttttcagggtaaaagagatccccacgctggccacaaaaccaatgctcagaccaaaagcgatactccccgcctcgcgacggttcatatagccttcaatcagttgcggcaggatcgggcggatgccgtcatgaaaaacagccgcgctgcgatgcgccagaaggcttgtcatacccgtcaggcacgccaccacgataatctgaatatacagatccatagtcgtgccttttatttcagatggttaatcagcatcggaatcgcgtgttcgacgtgctcaacggaaaggccaaacgccacttttccttcagcgatcattttggcgatatgctcgtctttcgctttaatgcctggtttggcaatggtgcaacttttgttatagcctatcaccgcgatggcaatgctcaatgccgcgcccgcaccggtattacacgcgccgatgtaataatccagttgcccggatttcaccttcattgccgcttccatgtcgttgtgaatgaaaacttcaaaacagccaggagccgtcgcttcaatagtttttttaatctgctcacgctgtaagcctgcaacgccaatctttttcatgagtctgtccttattggaaaaattgagagggattttcacgtaacatcacatccacatcggcctgactgaatccactctggcgcaattgcggaataaaggtggttagtaaatagtcatagccataaccaccgttggcttttaaatgggagcggcgcgtaatatccatgctcagcatgacgcggttcagcaacccacggtcgcgtagcgcatgaagcatcgcaatacgcttttcgtccgggtagtaactgttcttgccgatggtgtcgaactgcacgtacgcgccgagatcgatcatcttcaaaatgttgtcgaggttgtctttcagatcgcagtgaccaacggtgacgcggctaagatcaaccccgtgggcttgtagcaacgccagttgctccagccccatcgtgctgaagctcgtatgcgtggagatcgggcgtccggtctggttatgcgccagcgcagcggcaataaataccttctcttccagcggcgtaatctttccttcgctggtgccgatctccgcgatgatcccggctttcagctccgtgccatcgataccctgttcaatttcatcgaccatctcctgcgccagttcctgcacgctgcgggtcgccacatgttccgggaaaaacgcgtcctggtaataaccggtacaggccaccacgttgatccccgtctcgcgcattacatcaagcataaattgcgcattgcgccccatgtaacggttggtcatctcaatcacattacgcacgccccgggtcatcaggtcgttcatctcctggcaaatgaacgcatactgatcaaggcggcagtccacgttgtttttaaagccggagagatcaatatgcagatgctcatgggcgagggtgtaacccgtcggatcaaaactcatagggtgtctcctgcaaaccggagggaggaaagaaaagagcgaccattttgtggcggtggcgcgcggaaaaattcacacacggtagcccccacatcagaaagcgtggtgcgcacaccgagctgcgtagcgatcatcccttgctgataaaccagcactggcaccacttcgcgggtatggtggctgtgaccaatggtcggatcgttgccgtgatccgccatcacgaccaggcaatcatctggctgcatcgcctcaacaagccgggcaaggttacggtcaacgacctgcaaacgttcggcataacgtgcgacgtcttctgcatgaccagcgaggtcggtttcctgaatgttggtgcaaataaacgccgtcggatgggtgttaaattcgttgagggtgatatccataatccgctggctatccaccagattttgccagctcacgccataaggattgttgacgatatctgccaccttacccaccagcacggttggcacgcctgcttcatacagtttttgtggcacctgcactttttcatcgacgccatagcccatatgcacgacctggaaaccgttgtcataagcgccagaacgcggcgcattgataccaataaagcgcccttctttgctttctgcggcatcgagaatgcgttgactgtcggttaacaggccaccaaatgtaatgacccgaccgacctgtacctgctcacgcacgatacgaccaattttgattgcgtcgtcaaaagagatcacagagagattggcggtaatgttatagacctggcctaaatccgcctcgagattatcgccaatcgcaaccgcctgattgacccacagaaattgcagatcatcgccacggcgctccacctgccagccagcggaaactaatgcctgctcaacacggtcaatcacatcgcgaaaaggcatccgcagcggcggtaacgggcgcgtgcctaaaatttcctgatgccccataaaggtatcgccaccttcatgttgcagctctgccacgccccaggttgcggaatcactcggctgcatatcgcctggcgcataacccaatgcgttgattagccccagcgtctccagcgttggtagctgcaaatgcggcaactggctcaggatgtgaccacatgtattcgctcccgcatcttgcggacgcaccagcgtgacatctttcattgcccctacgccaaagctatcaatcactaacaccacaaatcgcgccattacgcccccagagagtttccaagactgtcataacgaccgacgatttccggttcgccacgatgaataccggacaccagcaccacatcgctacgggtgacaaaaatctgcgtgcgaaaacagagcaccactgcactgcttaccggaaactcgcctgccagcggcagggtgtagtcgatactgctgtcatccacagttttgagattggtttcagtaatcttttgattttctggcgtaaacaccaacgcatgttgcgcatgaccacgacgatagtaaccgccgccgtagcagtagctgtcgccacggaaatgatgggagatttcacttaaccagagcatcgcgatacgttcaggctgatcgccctgctggtttgccggaatagtgcccgtcagcgcatgaccgggttcggcatgagtcacaccgtattgcgccagtaatggcaggctagtgcagctggtcgcactaggcgcgttcagttgctcaagtgcaataccagatttcgccagttgatcccgtgcctgtatcagcgtgtgaagattcggtgtcggcaaaacttttccgacagcctcatcccaaagcaggcaagggaaatgggtaagtccggctaaatgcagccctggcagattctggatttcggcgacaatctccggcaacaccttgagggcaaaaccgctctcctggcccggataaagaaaatcatcgtcgctataaactttaagcagcacagactggattcgcccggccttcaccgccgccgcagaaacttcccgcgctttgtcgagagtaaacacggtgatgacgtcggtgccctgttcaacggcgtcagcaacctgatgacaagggatttgtaccagatgcccctgatgcgccacaggcaaaccagcgcggcgcatgactcgcgcctctttgtaatccaccgccacaatgccgctgtagcctaatgccagcaatttttccgccagccacggattacgaccaaactgcttggtcatcagatacagttcaatgccgtaaagccgcgccgtctcaatcagccgcttaccgttttccagtatctgatccacgtcgatcacccagctgtccggggcgatcttgccctgctgccacaggcttagtgcggcggaaatcagcgccgggttctggcgtttcaatgcttctacaaacatcttgttgcctcgtttctgttccttgaattaaatattcatttttttgaatatttaggttgtgcgacgtggatttgtcgggagcttcaaacctcttcgttagcagccatccataatccataaaggttggccagcaaatagccttcttcacacgggttaacttccagtgcgaattccttcaacaacacctgatgcaattgcacaacggcttgccagtggctggattgcgccagttctgccagcaactcgttatccagcggctctatttcttcaccacggcgactgcgcatcagtgcactcgccatatgtgtcatcgccatcgttccttgctcactgcgcaccggcagatggcactctgtttccagtacgttgacgacctgcatcatgcctttgcagatgtccttatcaataacgcctgcctcgcaaagcaggttgagtctggtttccatatcagatgcctttcgtttaataactcggttcctgttccccactcactacccgttgttgatgggcgagcagggcgtgtttatctacaacggcacgcagcagttgttgcattgggtaatcatcgactcgcgtcaggaccacggcttcggtggcctgtaaaaatcgcggatcgtctgtgagcggcgtcgcctctaatcccagcatggtcagttcgttttccgccaccacgttccagatcaccgcatcgacatcgcctttaacaatgcgttgtaaactctcgtgataagagagatcgactcgttccacatcactaccgccaaaaaaaacatcggtcatgattttctgatccgcgctacggttatccagccccacgcgcttcacgtttgcggactcgcctttacggcaaatcaactggtgctcgccaacgtaggtgtgcggccccaactccagcgcgaggcataagcctttttgcgtgagataactttccgccgctagtcggctaaccaccgccatgtcatacacgccattaagcagacactccacgcgaatatccgcgccacgcatgtgcgcatagtaaaaaggaatgccatcaaactgggctttcaatccgctcgccaggccttcgtacaaacgggtatagggcaagggcattgcacataccacgttgttgatatccacatgagtcagcaatgctttgttatccatctcgaccagataactgccattgcgcccacggcgttcaatccgtatcgctccgctactttccagcgttttcaacgcggcctgcgtcaggccaacggaactacggcattcatttgccagctcatctatggttttcaatcgattaccgcacttttcacccaacaaataacgggccagcgtcgtgatgacgacgccttcttttttgataaacgttcgacgcataataaattttcagtaaattgaatatttatatcttcaggaatttgaagataaggcgcaacagcgagatgtggaaacggcgaggcacttcacattttttcggattattgcaaatgaggataaaaaaaccgggtttccccggtttcagagtgatgataaaagcaaaattgcctgatgcgctacgcttatcaggcctacatttccttgcaatatgtgcattactttgtaggccggataaggcgttcacgccgcatccggcatgaacaaagcgcaatttgccagcaatagtgaattacggcttcgccacaaaaccaatcgcttcgtacaccgcttttagcgtacgggaagcgtgcgcgctggctttttccgcgccatctttcatcacctgttgcaggaaggcttcatcgttgcggaaacggtgatagcgttcctgcaattcagtcagcataccggaaacggcatcagccacttcacctttcagatgaccatacatcttgccttcgaactgtttttccagttctgggatgctctggcccgttaccgcactaaggatatccaacaggttggaaacgcccgctttgttctgcacatcgtagcgaactaccggcggctcgtcggagtcagtgaccgcacgtttgattttcttcactacgcttttcgggtcttccagcaggccgataacgttattgcgattatcgtcagacttggacatcttcttggtcggctccagcaggctcattacgcgcgcgccagatttcggaataaacggctccggcaccttaaagatctcgccatacagcgcgttgaaacgctgggcaatatcgcggctcagttcgaggtgctgtttctggtcttcacccaccggtaccagattagtttgatacagcaggatgtccgctgccatcagcaccggatagtcaaacagaccagcgttgatgttctcggcataacgcgcagatttatctttaaactgcgtcatgcgactcagttcgccgaagtaggtatagcagttcagtgcccagcctaactgtgcatgttccggcacgtgggactgaacaaaaatggtgcttttctcaggatcgataccacaagccagatacaaggccagcgtatccagcgtcgctttacgcagcttctgtgcatcctggcgcacggtgatcgcgtgttggtcaacgatacagtaaatgcaatggtagtcatcctgcatgtttacccactgacgcagcgcacccatgtagttaccaatggtcaattcaccactgggctgtgcgccactaaaaacgatgggcttagtcatttttgctttcctgattttcgctatgcggaagccctaatgcgggcagaaggtcatttatagactgataaattacatcaggctggctgagatcgatagcctcgccgtagttatatccgtaggttaagccaacacttgggcaacctgccgcttttgccgcctgaatatcattgcgactgtcgccgacaaacagcatctgttgtggggcaattcccatccgctcagccaccagtaacagcgggtccggatgcggttttttgttttgcacatcatcaccaccaatcaccacgctgaagtatttggcgatatctaaggcttcgagcagcggcgcgacgaacggcgtcggtttgttggtgaccaggcctagcggcaggcctttagcctgcaacgcgcccaacgtatcggcaacgtgcgggaacaaaaacgtcccctcttcggcaacctcgccatagtagcgatcgaacagtttacgcagaatacgtacctgttcttctgccggaatgtcgtcatcaacgggcggtttacccattgttttacgctgagtcgcacgttcctgacgcgcccaggtcaatgcgcgctccatcagaacatctgcgccgttaccaatccaggtaataacgcgttcttcacctgcgacgggcaactccagcgcatacagcgccatatctaccgcagcagcaagaccaggagcactgtcgaccagcgtaccatcaagatcaaaagcgacgccgcgaatatcttcaaacttattcatgacttacctttgccagttcactgcgcatttcatcaatgacttttttgtagtctggctggtcgaagattgcgctaccggcgacgaacatatccgcgcccgccgcagcgatttcgccaatgttgttcaccttcacgccaccgtccacttctagtcgaatgtcaaagccagactcgtcgatacggcgacgtacttcgcgcagtttatccagtgtttgaggaatgaaagactgaccgccgaaaccagggttgacggacatcagcaggatcacatccagcttatccatcacgtaatccagatagctcagaggtgtcgccgggttaaataccagacccgctttacagccattttctttaatcagttgcagcgtgcggtcaacatgctcggaggcttctggatgaaaggtaatgatgctggcaccagcggcagcgaaatcaggcacaatgcgatcgacgggtttcaccatcaggtgtacgtcgataggggcggtaatgccatagttacgcaaggatttcagcaccattggcccaatcgtcagattgggaacatagtggttatccatgacgtcaaaatgcacgacatcagcgccagctgccagggcttttgcggtatcttcacccaggcgggcaaaatcagcgctcagaatactgggggcaatcaaatactgtttcatccgcttctccttgagaattattttttcgcgggactaacgactcctggtttgtacaaagccagcagttcgtccacctttttacgtgtgccgccgttgctgcttatactgcgtcgaactttgacgacatgcaattttgcgcgctgataccactcacgcgttaacatcgtatcgtgattggagatcagcactggaatatggcgctcaaccagaccttcggcgatctccgccagatgcgcttgttgttcaagcgtaaaactgtttgtgtgatacgccgtaaagttggcggtcgcagacagcggtgcataaggcggatcgcaatagacgacggatgcatcatctgcgcgcgccatgctatcggcgtaagactcacaatagaaaaaggcattctgcgctttttcagcgaagtgatacaactctgcttccgggaaatagggttttttgtagcggccgaacggcacgttaaactcaccgcgcagattgtaacgacacaggccgttgtaaccgtagcggttcaaatataaaaacagtaccgcccgacggaacggatcctggcttttgttgaactcttcgcggaactgatagtaaacctcggcgcaatttgtttcgggaacaaacagctcgcgtgcggcctgtacgtactcatcagtacgcatcttcacaatgttatagagactgatcaggtcgctattgatatcggcaaggatataacgagaaaagtcggtgttgagaaacacgctcccggcacctacaaaaggctcaaccagacattcgcccttgggcaaatgccgtttaatatcatcaagcaggggatacttgccccctgcccacttcaaaaaagcgcgatttttcttcatgctgactaactaattacaccttctccggctgtggagaaagctccgacagcatccagcgcttcaggcaactcccgcaacgataaaccattgcgggagataaccttgattacttcagatcggcctgtacctgacgcagcggtttcgcccacgggtttttggcctggacatctgctggcaatgtagataccgcttttttcgcctcttctttgctagcgtacacgccagaaaccaggacataccacggctgaccattacgcgtcgtttcatagacaacgtagtttttcagattctctttcttcgcccaaccgttcaggttgtcgtagttagaggaactgctcagctgcagagtgtaatggctggacggtgcgcttttcaagctaccaacattacctgcggtcttcgccccagcagcgggtgttgctgtggtttgcgccggggatgccgtctgtactggagccgtagtcgccgtctcttttggtgctggcgtagaagtcgcagccggtgccttcgtgctcgccacaggggcagctggttcagtacgcttcggcgtctgtgctaccggcttcggctccgttttcacggttgcttgcggttttttcggttcaatcaccgcctgctgacgagctgggcgcgtagtggacggacgttcagcggtttgcgttttcgccgtgtcacggcttgcattgccattgcgaacaggcgcaaccgttgcgggttcagtcggcaacgtggaattgaccgccacattgttcagctgttgctgattttgtggctgggtcagcgcattgttcaggtcaccctgcacttcaacacgttgttgaccatccgttgccaccggggtttgcccttgagtcggcgtagaagagatcggtggcagagaaacatcctgctgagtattttccgcagacgtggttcccggcgctggctgcacgccattcgcctgatcggtcgcattgccagcaagatcaatactcttctcgccagacgcggtttgatcgctggaagtggtgctgggggcttttagcgcagaaccgataccgatgatcaacagcagtagaaccagaatgccgacgcccatcatcatatactgacgagaagcgggtttactggctgcttttttgcgcttacgcggacgacgctctacgcgctcttcatccacggtttcatcttcggattcgtcaatttcttcttcgatttccggttcctcattgcgctctttttgcgcacgagtcggacggcgatcgtcagtgtcatcaagttcaatatcatcaaaattgatctgcggttcgccacgttcagtacgctcagaacgttcagaagattgacgagaacgaccagtacgacgatcgctgggatcgggtttcagctcgtcttctggtttgaattcatccatttaacaccccactaaaaggttaatgcttaccacgttgcaattaacctgaagctaatagaccgcttgataagcggcctgacctttcttgttgttacgcactttgacaatcggcaatggcgttaagaacaagctcgtggctaacgccgctgcgaacttcactcttaccaattgccaacggaagaattaagcgcatctctcccgcaaggactttcttgtcacgcagcatatgcggtaaatacgcctgcgcggacatttcgcgcggcccattgaccggtaacccagcccgcttgagcagggttataatacgctgcgtttcggcagaactaaactgcccgagacgttcgctcgtccgcgccgccatcaccatacccgcagcgaccgcttcaccatgtaaccaattgccataccccatttcagcttcaatggcatgaccaaaggtgtgtcccagattcagtaaagcacgtaacccggtttcgcgctcgtcggcggcgacaacttctgccttcagttcacaacaacggcgaatacagtacgccattgccggaccgtccagacgcaacaacgcatccagattctcttccagccagttaaaaaacgcaccgtcaagaataatgccgtatttgatgacttctgccagcccgctcgctaactcacgcgggggaagcgttttcagacagtcgagatccaccaccacactagcaggttggtagaacgcgccaatcatgtttttaccgaggggatggttgaccgcagttttgccgccaacggaggaatcgacctggctcagtaacgtcgtcgggacttgaatgaaacggacaccgcgctgataactcgccgccgcgaagccggtcagatcgcccactacgccgccgccaagcgccaccagcgtagtatcgcgaccatgcggtttttgtaacaacgccgtaaagacggtatcgagtacagccaggcttttatactgctcgccgtcagggaggataacgctatcgacgttaacacccgcctgttcaagtacgccgcggaccttatcgagatacagaggagccagggtttcgttggtgaccaacatgacctgctcgccgcttttcagcggtaagaaactagctggttcattaaacaaaccagatgcgatggtaattgggtaactacgttccccgagagtaacgacaatcctctccataacgcgacatccaccttaattactgtacccgcagacgagtgtatataaagccagaattagttgctttccagcatgtgaataatctggtttgcaaccactttagcgctttgatcatcagtacgaatggtcacgtcggcaatctcttcatacagcggattgcgttcattggccaacgcttccagaacttcacgcggcggtgtttcaacgtgcagcaacgggcgttttttatcacgctgcgtgcgtgcaagttgcttttcgatggtcgtttcaagataaacgacaacgccacgagcggaaagacggttacgcgtttcacgggatttcacagagccgccgccagtagccagcacaataccctgtttctcggtcaactcattgatgaccttttcttcgcgatcgcggaagccttcttcgccttctaaatcgaaaacccagcccacatcagctccggttcgtttctcaatctcttgatcggaatcgtaaaattccatattgagttgttgagctaactggcgcccaatagtgctttttccggcacccataggcccaaccagaaagatattgcgtttctctgccattttttcggtactactaagactattcgttaatgataaacccgcttcgctcagagagcgccgcaggacatgaactgaaacctcataagatattgcgagagtcagactgaaaattatctcaatactccagcgggtttggcaactgaataaatcacccatccctctgcatatctggtcgctgcaagcgcgctgccttgctaccaccgctctggcgataaatcaccgggtaagattagcgtaaaaaagacagcaaaatgccgcctgaatgataaatcatcatcatggaacgcaggcagcgaagagcaccaactctcaaatcggtactccttgtatgctaaatacctgcgcgcgtcaaatagatgaaacacgttcagcgtaaaaacattaccgcttttacggctgtttactcactggaaaccagtcgtggcgtgataaacaccactaactcgcgtcgttcatcttcttttccgtcatgacgaaatgattgcccgaaccagggaatgtcgccaagcaacggtacgctatcctgaccgcttttatttttacgggtaaaaatgccgcccagcgccaacgtttctccgcttttgacctcgacctgcgtttcgatctcctgcttatcaatcgccagcacttcgccatcggcctgctgtagcacctgccccggaacgttctggctgatgtgtaatttcagccggatgcgacctttttgtaacaccgtgggcgtgacctccatccccaggacggcctctttaaattccacgctcgtcgcgccactttccccgctggaaacctgatatggaatttcgctcccctgtttaatgctggcaggctgaagatgactggccagcagacgcggactggcgataatatccagctgctgtttttgttcgagcgcggaaagctcaagatccagcaagcgtccgttgatgcgcccaatgttaaaaccgacatgcgttgtcgccgtcgctacggagaggtcgctaccaagcgtggtgacttgcccaacgccaccagcgtgttgcgcatcggccagcgtccatttcacgcctaactcacgcaaacttttttcattaatggtgacaatatgcgcgctcagctcaacctgcccgaccggcagatccatttgcgctacccactgttcaagcgcgcttaacgccgttttgttatctcgtagcaaaaggcgattggtgcgtttatcgacggtcatactccctttggcactcagcagcttctcccccgctttcgccagttctcccgcgtcggcgtattgcagggttatactgcgattttccagcggcagatttgcctgcgcccgcgcctgctccgcctcctggcgggcgatattgttattctgccaggcaatggaatgcacactgagaatgttgccttcctgccgcgttatcagtccggcgcttttcactacagtttgtagtgcctgcttccagggaacatctgttagatgtaagctcaccgtaccgctgacgtctgggctcacgaccaggttcaacttctcctgttcagccagcgcctgcaacacctgagctaccggaacgtcatccaccatcagcgtcactttttgcggctttgccgcctgtacgccgggtatcagcatcaacagtagtgcggctatccattgcttcatttgtatctccttgccgttgccacaaccattgtggcggttcgcagtttgtcccggtacccagcgttagtacgtctggcgtcagctgtaaaattgtccagccgttttccagcacatcgttttgctgcacccgtcgccatttcttttgcccgtcttttattacaccgatgatgcgctcgcctcgccctaccatcccctgatagcgccactggctaagttcgctaatccggcatagatcttccggcggtttaaaagggtcacgcataccggttaaaaggcacaatgcaatacctgccaacaaccagcgtttaaccctcatgcggcgtctccagttgtagcgtgaacaaaagatcatcaccttccacgcttaagctaaaacggctcacgctgacgttgcgctctgccagccgtgtaaatgcgctcggcactgcttcccacagcgttttcaacgccaactcgcctccctgcgcggatggatgccaggaaaccagttgcgcgccggataactgaaaatccagtgggctaaagggcagcgttttttcctcgctgaagggagcggtgtctaccaggcgatacagtgcggcccactgctggtgatgacttgcccgtagtcgaattaatgcgtcgcgctcttcatggtgtgtgctactcagaaaaatgagcgtaactaacatcagcaaccagaatgcccagcaaagctggcggaggcggggacttgtggcgaaccaccagtcaaagaacatgttcatcgctaaccttccttgttaactgatactcaaattgccagcgtccctgcgcatcctgctgcgtggctccccgctgattgagatgaaaagatgcatcctggcggagactcgtttctagtgcgtttaacgcggtaatgcttgttgtcagccccttgatctccagcgttccctgctgccagcttatcgttgtcagccaggcgtgctcgggtaaaagcgccgccagtgcttccagcgcagattgccagtcgcgggtaaattgtcgctggcgctgccgttggctacgctgttcgcgtaactgctgttgctccagcaaacgtggcttcgttatctgtaagctgcgggcgagttgttgttccgcctgaagcaaaactgcgtctatgcgcgcttcggcgctgcctgtcagacgcagtattagcgttatcccgacggccagcagcagaggcgcaacgaacatcagcaaccagaaacgcagaaaagcggtccggcgttgctgtcgccagggcaaaaaattaattggcgggttcatcagtacgccttcccaagcgccagccccagcgcgatggcaaagtctccacctggcggcggtagcggcggctgacgaacagaaacggcctcccagggatcaaatccgccttcgccacatatcgcgacgctttcgggatcaacggataacgctgccgccagctccttcgcgctagtcatccccaccgccagtttgcgcccccagctatagcgcgtcgcccacagccactgttcgttatcacgccaggccagacattgctgatgagaaggtaaaaaaggcaggaatcgctgtaatgcactggcatccggggtgatcgcgctcacatgaacacgcaacctttctgccagagtaagcagcgttgccagctctttgctttgcgcggcagtcacgttataggcgggactgagactgtcttcgctgtaatcgaagcgcagggagtccggatccatatccagctcgcgggccatcgtcccactcagccaggccgtttgctcccgctcaccaagggacatgctcgggcgcggaaaactccgctgtaatgtgcgactggcgggaaacgccaacataatgtgatgacgctgcggcagttcgcgactccacggtaacaacgttttagccagctgctgcgcatcaacaatccgcccatctttgataatgtcgttctccagcggcaaccgccaccagcgttgcaaaaagcattcttttgcgccccgcacgatcgcaaccgctaccgcttcttgctgttgtaaatgcaaaccaatttgccagatcttaaatgccattgtgatgatctccttatcacccgtcactctgacgggtatatcaatgcgtctggcttgcctttatactaccgcgcgtttgtttataaactgcccaaatgaaactaaatgggaaatttccagtgaagttcgtaaagtattttttgatccttgcagtctgttgcattctgctgggagcaggcagcatttatggcctataccgctacatcgagccacaactgccggatgtggcgacattaaaagatgttcgcctgcaaattccgatgcagatttacagcgccgatggcgagctgattgctcaatacggtgagaaacgtcgtattccggttacgttggatcaaatcccaccggagatggtgaaagcctttatcgcgacagaagacagccgcttctacgagcatcacggcgttgacccggtggggatcttccgtgcagcaagcgtggcgctgttctccggtcacgcgagtcaaggggcaagtaccattacccagcagctggcgagaaacttcttcctcagtccagaacgcacgctgatgcgtaagattaaggaagtcttcctcgcgattcgcattgaacagctgctgacgaaagacgagatcctcgagctttatctgaacaagatttaccttggttaccgcgcctatggtgtcggtgctgcggcacaagtctatttcggaaaaacggtcgaccaactgacgctgaacgaaatggcggtgatagccgggctgccgaaagcgccttccaccttcaacccgctctacagcatggatcgtgccgtcgcgcggcgtaacgtcgtgctgagccggatgctggatgaagggtatatcacccaacaacagttcgatcagacacgcactgaggcgattaacgctaactatcacgcgccggagattgctttctctgcgccgtacctgagcgaaatggtgcgccaggagatgtataaccgttatggcgaaagtgcctatgaagacggttatcgcatttacaccaccatcacccgcaaagtgcagcaggccgcgcagcaggcggtacgtaataacgtgctggactacgacatgcgccacggctatcgcggcccggcaaatgtgctgtggaaagtgggcgagagcgcgtgggataacaacaagattaccgatacgctgaaggcgctgccaacctatggtccgctgctgcctgccgcagtcaccagcgccaatcctcagcaagcgacggcgatgctggcggacgggagcaccgtcgcattgagtatggaaggcgttcgctgggcgcgtccttaccgtagcgatactcagcaaggaccgacgccgcgtaaagtgaccgatgttctgcaaacgggtcagcaaatctgggttcgtcaggttggcgatgcatggtggctggcacaagtgccggaagtgaacagcgcgctggtgagcatcaatccgcaaaacggtgccgttatggcgctggtcggtggctttgatttcaatcagagcaagtttaaccgcgccacccaggcactgcgtcaggtgggttccaacatcaaaccgttcctctacaccgcggcgatggataaaggtctgacgctggcaagtatgttgaacgatgtgccaatttctcgctgggatgcaagtgccggttctgactggcagccgaagaacagtccaccgcagtatgctggtccaattcgcttacgtcaggggctgggtcagagcaaaaacgtggtgatggtacgcgcaatgcgggcgatgggcgtcgactacgctgcagaatatctgcaacgcttcggcttcccggcacaaaacattgtccacaccgaaagcctggcgctgggtagtgcgtccttcaccccaatgcaggtggcgcgcggctacgcggtcatggcgaacggcggcttcctggtggacccgtggtttatcagcaaaattgaaaacgatcagggcggcgtgattttcgaagcgaaaccgaaagtagcctgcccggaatgcgatattccggtgatttacggtgatacgcagaaaagcaacgtgctggaaaataacgatgttgaagatgtcgctatctcccgcgagcagcagaatgtttctgtaccaatgccgcagctggagcaggcaaatcaggcgttagtggcgaagactggcgcgcaggagtacgcaccgcacgtcatcaacactccgctggcattcctgattaagagtgctttgaacaccaatatctttggtgagccaggctggcagggtactggctggcgtgcaggtcgtgatttgcagcgtcgcgatatcggcgggaaaaccgggaccactaacagtagcaaagatgcgtggttcagcggttacggtccgggcgttgtgaccagcgtctggattggctttgatgatcaccgtcgtaatctcggtcatacaacggcttccggagcgattaaagatcagatcagtggttacgaaggcggtgccaagagtgcccagcctgcatgggacgcttatatgaaagccgttcttgaaggtgtgccggagcagccgctgacgccgccaccgggtattgtgacggtgaatatcgatcgcagcaccgggcagttagctaatggtggcaacagccgcgaagagtatttcatcgaaggtacgcagccgacacaacaggcagtgcacgaggtgggaacgaccattatcgataatggcgaggcacaggaattgttctgattaaaaaggcgcttcggcgccttttcagtttgctgacaaagtgcacttgtttatgccggatacggcgtgaacgcgttatccggctaacaaaatcgtgaaaactcaataaattgcagaaaccccataagcctgataaacattgtgcatcaggcaaacttcacgcatttacactcgcccctgccctttcaaccattcgcgcacgaggaacagcgcactgacattgcgcgcttcattgaagtcagggtcttccagccaatccatcatatgcgccagcggccagcgcacctgtggtagcggctctggctcatcgccttccagactttccgggtagagatcttgcgctaccacgatattcattttgctggaaaagtaagacggtgccatgctgagcttcttcaaaaaagtcagatcgttcgctccaaatccaacctcttcttttagctcgcggttagcggcttcgtagacgctttcacccggatcaattaatcctttgctaaaacctaattcgtaggattcagttcccactgcgtattcgcggatcaggatcaggtgatcgtccacaatcggcacaatcatcactgcttcccggttggttggacgcattcgttcataaacacgccgcacgccattgctgaactccagatccacgctctcgacggtaaacagtcgggaacgggctacagtttcaacattcagaatggtgggtttttgtaaacttttgctcatcgtgggatctatgctgtgaaatcagcggttattgtgcgatatcggacacgctttcggcaatgtgaattgcatgttatttacatttatgtaacttaataaataatcgtcctcaaatcaaattaaaagtcaataggttgaaataactccaggaatttgctgatattccgccttcagagggtttgctatgatcagcggttactgtgatgtgcttaatgatgctcaagttaaactccacgcttgccgatagccaaccgcagaatcatgtattgtgtccggtgcgactgaccacgcctgacagactaagtaagatggggaaagcatgagcaccattgtgatttttttagctgctttgctggcctgcagtctacttgcgggatggctgataaaagtgcgatccagacggcgtcagctgccctggaccaacgccttcgcggatgcgcaaacgcgtaaactcacacctgaagaacgtagcgccgttgaaaattatcttgagagcctgacgcaggtattacaggtgcctggcccaacgggagccagcgcggcaccgatctctctggcgctgaatgccgaaagcaacaacgtcatgatgctgacacacgctatcacgcgttacggcatctctaccgacgatccgaataaatggcgttactacctcgatagcgtagaagtccacctgccccctttctgggaacagtacatcaacgatgagaataccgttgaactgattcataccgatagcctgccgctggttattagtctcaacggtcatacgctgcaggagtacatgcaggaaactcgcagctatgccttgcaacctgttccgagtacgcaggcgagcattcgcggggaagagagtgagcaaatcgagctactcaatattcgcaaagaaacgcatgaagaatatgcgctgagtcgtccgcgcgggctgcgtgaagcgttgctgatcgtcgcctccttcctgatgttctttttctgcctgattaccccggatgtatttgttccgtggctggcaggcggcgcgttactgctgctgggcgcaggtctgtgggggctattcgcgcccccggcaaaatcctccctgcgggaaattcattgtctgcgcggtacaccccgtcgttggggattgtttggcgaaaacgatcaggaacagatcaacaatattagtctcggtattatcgacctggtctatcccgcacactggcagccatacattgctcaggatctcggtcaacaaaccgatatcgatatctatctcgaccgccatgtagtgcgtcagggacgatatcttagcctgcatgatgaagtaaaaaactttccgttacagcactggctgcgcagtacgattatcgctgcgggcagcctgctggtgctgtttatgctgttattctggatcccgctggatatgccgctgaaattcactctcagttggatgaaaggcgcgcagaccattgaagccactagcgtaaaacaactggctgacgctggcgtgcgggtaggcgatacattgcgtattagcggtacgggaatgtgtaatattcgaacttccggaacctggagcgcgaaaaccaatagtccttttttaccgtttgactgcagccagatcatctggaacgacgcccgcagtttgccattaccagaatctgaactggtcaacaaagcgacggcattgactgaagcagttaatcgccagctgcaccctaaaccggaagatgaatctcgcgtcagtgccagtttacgtagtgcaattcaaaaatccggcatggtattgcttgatgattttggcgacattgtactgaagacagcggatttatgttctgccaaagatgactgtgtgcgactgaaaaatgcgctggtcaatctcggcaacagtaaagactgggacgcgctggtaaaacgcgccaacgccgggaagctcgatggcgtgaatgtgttattacgcccggtgagtgcggaaagcctggataacctggtggcaacctccaccgcgccgtttatcacgcatgaaacggcgcgagcggcacaaagtctaaacagtccggcccccggcggattcctgattgtcagcgacgaaggcagcgattttgttgatcagccctggcctagcgcaagtctttacgactacccgccgcaagaacagtggaacgctttccagaaactggcacaaatgctgatgcatacgccgtttaacgccgagggtatcgtcacaaaaatcttcactgacgccaatggtacgcagcatattggccttcatccgatcccggatcgttccggcctgtggcgctatctcagcaccacattgctgctactgacgatgctgggtagcgccatttacaatggcgtacaggcctggcgtcgttaccagcgtcatcgcactcgcatgatggagattcaggcctattatgaaagctgcctgaacccgcaactgatcacccctagtgaaagccttatcgaataacacgtttgcgcggcaggttatgctaccctgtcgcgcaaattgcttcactctggagatttccctcatgcatatcaacattgcctggcaggacgtagataccgttctgctggatatggacggcacgttgctcgacctcgccttcgataactatttctggcaaaagctggtgcctgaaacatggggcgcgaaaacggggttacgccacaggaagcgatggaatatatgcgccagcaatatcacgacgtacagcatacgctaaactggtactgtcttgattactggagtgagcaactgggtctggatatctgtgcgatgaccaccgagatgggaccgcgtgccgtactgcgtgaagataccattccgtttcttgaggcactgaaagccagcggtaagcagcgaattttgctcaccaatgcgcatccgcacaacctggcggtaaaacttgagcataccggtctggacgcacaccttgatttattactttccacccacacatttggttatccgaaagaggatcagcggttatggcatgcggtggccgaagctacgggtctgaaagctgaaagaacgctgtttattgatgacagcgaagcgattctcgatgctgccgcgcaatttggtattcgttactgcctcggcgtgactaatcctgattccgggattgccgagaaacagtatcaacgccatccgagtctgaatgactaccgccgcctgatccccagcctaatgtgaaggagacgccatgaaagagaaacctgctgttgaggttcgactggataaatggctatgggctgcccgtttttataaaacccgcgcgctggcccgtgaaatgattgaaggcggtaaggtgcattacaacgggcagcgcagcaagccgagcaaaatcgtcgagctgaatgccacgctcactctgcgccagggaaatgacgaacgcacggtgattgtaaaggcgattactgaacagcgtcgccccgccagcgaggcagccttgctgtatgaagagactgcggaaagtgtagagaaacgcgaaaaaatggcgctggcacgtaaacttaatgccttaaccatgccgcacccggaccgacgcccggacaaaaaagagcgccgcgacctgttacgatttaaacacggcgacagtgaataactgtcacctgcaagagagatgattatgccgcaacatgaccaattacatcgctatctgtttgaaaactttgccgtgcgcggcgaactggtaaccgttagcgaaaccctgcaacagatccttgagaaccacgattatccgcagcccgttaaaaacgtgctggcagaactgctggttgcgaccagcctgttaaccgctacgctgaagtttgatggtgatatcaccgtacagctgcagggcgacggtccgatgaatctggcggttattaacggtaacaataaccagcagatgcgcggtgtggcgcgcgtgcagggcgaaattccagaaaatgccgacctgaaaacgctggtcggcaatggttacgtggtgatcaccattaccccgagcgaaggcgaacgctatcagggcgtagttggtctggaaggtgataccctggcggcctgcctggaagattactttatgcgttctgaacagctgccgacgcgcctgtttattcgcaccggcgacgtagacggcaaaccggctgcaggcggtatgttgttgcaggtaatgcctgcgcaaaatgcccagcaggacgactttgaccacctggcgacgctaaccgaaaccatcaaaaccgaagaactgctgaccttaccggcaaacgaagtgttgtggcgtttgtatcacgaagaagaggtgacggtttacgatccgcaggatgtggagttcaaatgcacctgcagccgtgaacgttgcgccgatgcgctgaaaacgctgcctgatgaagaagttgatagcatcctggcggaagatggcgaaattgacatgcattgtgattactgcggtaaccactatctgttcaatgcgatggatattgctgaaatccgcaacaacgcgtctccggcagatccgcaagttcattaatgagtatgtccggcagagagggctctgccggattttacgactaatacacctgatgcgctttgtcactcattcagattcacattcagcctttcaccatccactacaagatcgcgccacgctttaggcttcgtccccagttttccatccttcgcagctgtgagtaatttttctttcgttatttcgttcggaagtaaactcatatcaagcgcgtcccattcttttctgtcactgtcaaagccatagacaatgactctgtcatcattaaaagcaaacaggatccgctccgcctgaccatcactattcagatcttgctcgaccaggacgcaggcgtctttttcaatacaggtcatcacgttatagcgatcctggattaaggcgctccagaatgtcgcatcaggtttaacagaaccaggggcaattaacacattatcggctaatactttttcgcttacctgttgctgaagatgttgctctccatctaacgccatcagcagatcccgcgcgcgtttcgggtctttcataaacccggcatcgcttttcaggctctcaagcgcagcacgtccatagcgaccgctctgctcgagcatgtagatagttacctggtcactcgtgtttttgccgctctgataacgcgccatatggctgttcacgctaatgcgcatactgtccagcaccgggctattaagaagcaccagtatcaccaacaccaataagctaaccgcaaggttcactttgccctgaagaacaacgggattttgccctttacgccagacgatgctgacaaaataccccaggctccacaccagtaacaccagcaccgccagcacgccctgcaagcggtcgacagtccagccgtactgagcgacccgcagccataacgcccaggcggcgacgaacacatacagcggagcaaccagcaaagcggttttaatcaggcaacgcaacggccctgtccagggaagactcgctttttgcggatcgcggacaatagccattaagatcaattgcaaaaaggccagcgtcaacagcaacccggcggcggagatgtggcgagaaatcgcgctcaggcccgtaaacggcagggtgatgataaacatcagggttagcaaacttactaacggcagcaaccccgtggcgattaacgtgaacaacttttgaatagagtcgattaaacgactctgtgttcgcgcgaggatcaccgccagcgcggtaaccagacctaacgtgagataaataaaccagtcggttgcaaaaaagagcgtattgaaaaacgtgatgccaacaagtttaaacaactcactccacagtaaaagcaccagccacgtcaagccattggcgagaaaaatcaccagtaatataagtacgttatgccatacactctggtaaaaatagcgatagcggctactgtcattgcggatgcgaaggctttgttgtatccacggtagcaacaacattgccatcaacagcagatagcaaccaaaatcccaaagcgccttttcagctctccaggggttcatgccatcagtttgccacttcagccagccgctcatccccagcgtggcaataaacactagcgccagccatccccaaaggcgcttctgtttaaaagagatcacggagaagagtaaaacggaactaaacgcgacggtcgcaggcacgccataaacaatccaactgtgattttttccggaaagccaggcgatcagcaggtagcaaaccagaccctgaagtaatccggtagcaatcatcccccagcgtgttgcgggactaagttcaacgttatccatgttggttatccagaatcaaaaggtgggttaattatcgcatccgggcagtagtattttgcttttttcagaaaataatcaaaaaaagttagcgtggtgaatcgatactttaccggttgaatttgcatcaatttcattcaggaatgcgattccactcacaatattcccgccatataaaccaagatttaaccttttgagaacattttccacacctaaaatgctatttctgcgataatagcaaccgtttcgtgacaggaatcacggagttttttgtcaaatatgaatttctccagatacgtaaatctatgagccttgtcgcggttaacacccccaaaaagactttactattcaggcaatacatattggctaaggagcagtgaaatgcgcgttaacaatggtttgaccccgcaagaactcgaggcttatggtatcagtgacgtacatgatatcgtttacaacccaagctacgacctgctgtatcaggaagagctcgatccgagcctgacaggttatgagcgcggggtgttaactaatctgggtgccgttgccgtcgataccgggatcttcaccggtcgtagtccaaaagataagtatatcgtccgtgacgataccactcgcgatactttctggtgggcagacaaaggcaaaggtaagaacgacaacaaacctctctctccggaaacctggcagcatctgaaaggcctggtgaccaggcagctttccggcaaacgtctgttcgttgtcgacgctttctgtggtgcgaacccggatactcgtctttccgtccgtttcatcaccgaagtggcctggcaggcgcattttgtcaaaaacatgtttattcgcccgagcgatgaagaactggcaggtttcaaaccagactttatcgttatgaacggcgcgaagtgcactaacccgcagtggaaagaacagggtctcaactccgaaaacttcgtggcgtttaacctgaccgagcgcatgcagctgattggcggcacctggtacggcggcgaaatgaagaaagggatgttcagcatgatgaactacctgctgccgctgaaaggtatcgcttctatgcactgctccgccaacgttggtgagaaaggcgatgttgcggtgttcttcggcctttccggcaccggtaaaaccaccctttccaccgacccgaaacgtcgcctgattggcgatgacgaacacggctgggacgatgacggcgtgtttaacttcgaaggcggctgctacgcaaaaactatcaagctgagcaaagaagcggaacctgaaatctacaacgctatccgtcgtgatgcgttgctggaaaacgtcaccgtgcgtgaagatggcactatcgactttgatgatggtagtaaaaccgagaacacccgcgtttcttatccgatctatcacatcgataacattgttaagccggtttccaaagcgggccacgcgactaaggttatcttcctgactgctgatgctttcggcgtgttgccgccggtttctcgcctgactgccgatcaaacccagtatcacttcctctctggcttcaccgccaaactggccggtactgagcgtggcatcaccgaaccgacgccaaccttctccgcttgcttcggcgcggcattcctgagcctgcacccgactcagtacgcagaagtgctggtgaaacgtatgcaggcggcgggcgcgcaggcttatctggttaacactggctggaacggcactggcaaacgtatcagcattaaagatacccgcgccattatcgacgccatcctcaacggtagcctggataatgcagaaaccttcactctgccgatgtttaacctggcgatcccaaccgaactgccgggcgtagacacgaagattctcgatccgcgtaacacctacgcttctccggaacagtggcaggaaaaagccgaaaccctggcgaaactgtttatcgacaacttcgataaatacaccgacacccctgcgggtgccgcgctggtagcggctggtccgaaactgtaatgatttgaagctggagaatatctatccagtatcttatagaaagcaaaacgggaggcaccttcgcctcccgtttatttacccttcttttgtcgtgccctgcgcccgcgttaccggcactggcagccaggcgcgaatggaaagcccgccccgctcgctggtgccaagctccagcatcccgttatggttatccacgatacgctgcacaattgccagccctaatcccgtgccgctaatggtgcgcgcactgtcgccgcggacaaacggctggaacaggtgcttacgttgttccggcgcaattcccggaccgtcatcttccacctggaaccaggcgcgattcggctccgttccgctgctgactttgatccagccattgccataacgggcggcgttgaccaccatattcgccaccgcgcgtttgatgctcagcgggtgcattttcacttcaatgctgccggggtaaagcgcggtttcaatttcccgctcatagccactttcggcagcaatcacctcaccgagtactgcattaagatccgccatttccatcggcatctcctgcccggtgcgcaggtagtcgataaactgctcaatgatggcgttgcactcttcgatatctttattgatgctttctgccagatagccatcctgctcgctcatcatctcagtcgccaggcgaatacgcgtcagcggcgtgcgcaagtcgtgacttacccccgccatcagcagcgtgcggtcatccgccagttgcttaacaccagccgccatatggttaaaggcacgggtaacggaacgcacctcgctagcgccatactcacgcagcggcggcggaataatccctttaccaacctgcaaggctgcgtgttcgagatcgaccaacggtcggttctggatacgaataaacagccacgccccgcctatcgccaatagcataatcgccagcgtatagcggaacagcggagagaaatcgccctgatgaatttcggtcagcggcacgcgtacccagatattggggctcagccaggttttcagccagacgacagggctacttttgttgacctcaacgcgcacttccgtcgggccgcccagttgctgcgccatctgatggcttaagaattcatagtgttgcgcccaacgcagacctgcctcttcggcagcctcgttggagtagagagagatccccagctcacggtagatctcccgacggaaagcgggaggcacaaccaactgcgtgccgtcctccagttgcagtttgtcggtcatcaacatacgcacttcgtacgcgaggactttattaaactgctggaggctcggcaaaatcgcgaagttcagcaccaccagataagtcgtcaccaggctggcgaacagcaaggtgacgatgagcaataacgtacgggcaaaactacttcgtgggctgaagcgcaatcgcctcatgctttagagccgtccggtacaaagacgtagcccagaccccagacggtctgaatgtaacgcggatgcgctggatcttcttccaccatgcggcgcagacggctaatctgcacgtcgatggagcgttccattgcggaatattcacgaccacgggcaaggttcatcagcttatcgcgggagagcggctcacgcggatggctgaccagtgccttcagtaccgcaaactcaccgctggtgagcggcatcggctcgtcttcgcggaacatttcgcgcgtaccgaggttaagtttgaacttaccgaaagcaattaccgcctcttcctgactcggtgcgcctggcagttcgttcgcctgacgacgcagcaccgcacggatacgggccagcagttcacgcgggttaaacggttttggaatgtagtcgtcagcgccaatctccaggcctacgatacggtccacttcttcccctttcgccgtcaccataatgatcggcatcgggttgctctgactacgaagacgtcggcaaatgctcaagccatcttcaccaggtaacattaaatccagtaccataagatggaaagattcacgagtcagcaggcgatccatctgttctgcattagcgacgcttcgaacctggaagccttgttcggtgagataacgttccagcagcgcacgcaggcgcatgtcgtcatcgaccaccagaatcttgtagttctcttgcattgtttgtactcccaaaggttcgcaacaatttgtaagcgtgtattcttaaaaaagctcacgttcgtcaccagctaaatctggtatgaatttcagcctaaattgttacaaagcatattaaacagcagcttaagtatacaatttattcggcgaaacattattgattctgttgatatgatcacgttatacccaatgtgcgcattatcaaacagacaaagggaatcaacgagatgaaaacgcccctggttacccgggaagggtatgaaaaactcaaacaagagcttaattatctctggcgtgaagaacgcccggaggtcacaaaaaaggtgacctgggccgcaagtctgggcgaccgcagcgaaaatgctgactatcagtataataaaaagcgtctgcgtgaaatcgaccgtcgcgtgcgctatctcactaaatgcctggaaaatctcaaaatcgtcgattactcccctcagcaggaaggcaaagtcttttttggcgcgtgggtggagattgaaaacgacgatggcgtgactcaccgtttccgtattgtcggctacgatgaaatttttggccgtaaagattacatctctatcgattccccgatggcccgcgcattgctgaaaaaagaagtcggcgatctggcggtggtgaatacccctgccggggaagcgagctggtatgttaatgctatcgagtacgtgaaaccgtaaggaagagtcttaacctcctgccgatggctggcatttttgccagccagtccgtataactatcccctgatttttgatccgaaaagatgaactcaaaccatgatgaatgatagcttctgccgcattattgcgggtgaaattcaggcgcgcccggaacaggttgacgctgccgttcgcctgcttgacgaagggaataccgtgccgtttatcgcacgttatcgtaaggaaatcaccggcggtctggatgacacgcagctgcgtaatctggaaacgcgtctgagctatctgcgcgagctggaagagagacgtcaggcgatcctcaagtccatttccgagcaaggcaaactcaccgatgatctggcgaaggccatcaacgccaccctaagcaaaaccgaactcgaagacctctacctgccctacaaacctaaacgccgcacccgcgggcaaatcgccattgaagcagggcttgagccgttggctgacctgctgtggagcgatccgagtcacacgccagaagtcgccgctgcacaatatgtttatgccgataaaggcgtggcagataccaaagccgcgctggatggcgcgcgctatatcctgatggaacggtttgccgaagatgccgcgctgctggcgaaagtgcgtgattatctgtggaagaacgcgcatttggtttctacggtggtgagcggtaaagaagaggaaggggcgaaattccgcgactatttcgatcatcacgaaccgttgtccacggtgccttctcaccgcgcgctggcgatgttccgtgggcgtaacgaaggcgtacttcagcttagcctgaatgccgatccacagttcgatgagccgcccaaagagagctattgcgagcaaatcatcatggatcaccttggcctgcgcctgaacaatgccccggcggatagctggcgcaaaggcgtggtgagctggacgtggcgcatcaaggtgctgatgcatctggaaaccgaactgatgggcaccgtgcgcgaacgtgcggaagatgaagcaatcaacgtctttgcccgtaacctgcacgatctgctgatggcggcccctgccggactgcgtgcaacgatgggcctcgatccgggtctgcgtactggggtaaaagtggcggtggtcgatgccactggcaaactggtggcgaccgacaccatttacccgcacaccggacaggccgcaaaagcagcgatgaccgttgctgcgctgtgtgaaaaacataacgttgaactggtagcgatcggtaacggtacagcttcccgcgaaactgagcgtttctatctcgatgtgcagaagcagttcccgaaagtgaccgcgcagaaagtaatcgtcagcgaagcaggcgcgagcgtttacagcgcttccgagctggctgcacaggagttcccggatctcgacgttagcctgcgtggcgcggtgtctatcgcccgccgtttgcaggatccgctggcggagctggtgaaaatcgatccgaaatctatcggcgtaggtcagtatcagcatgacgtcagccagacgcaactggcccgcaaactggacgcagtagtagaagactgcgtaaacgccgttggcgtcgatctcaacactgcttctgttccgctgttaacccgcgtggcgggcctgacgcgcatgatggcgcaaaacatcgttgcctggcgcgatgagaacggtcagttccagaaccgtcagcaactgttaaaagtgagccgtctggggccgaaagccttcgagcagtgcgcgggcttcttgcgcattaaccacggtgataacccgctggacgcgtctaccgttcacccggaagcctatccggtggtggaacgcattctggcagcaacacagcaggcactgaaagatctgatgggtaacagcagcgaactgcgtaacctgaaagcgtctgactttactgatgagaaattcggtgtgccgacggtaaccgacatcatcaaagagctggaaaaaccgggtcgcgatccgcgtccggaatttaaaaccgctcagtttgccgatggcgtcgagacaatgaacgacctgcaaccgggtatgatcctcgaaggcgcagtgaccaacgtcaccaactttggcgcgtttgtcgatattggcgtgcatcaggacggcctggttcacatctctagtttgagcaacaagtttgtggaagatccgcataccgtggtgaaagcgggcgacattgtgaaggtgaaagtgctggaagtggatcttcagcgtaaacgtatcgccctgactatgcgcctggatgagcagcctggcgaaaccaacgctcgtcgcggcggcggtaatgaacgcccgcaaaacaaccgcccggcagccaaaccacgcggtcgtgaagcgcagcctgccggtaatagcgcgatgatggatgcgctggcggcggcaatgggcaaaaaacgttaaacgcccgtactggcctacggttcgaatttgcacgaaatcgtagggcagataaggcgttcacgccgcatctggcaacgaacgccttgcctgacataaaagtgccggagaatatctccggcatttttattccacagccaaactcataatatattccggcaatatttatcatttcattaacaactgaaaccttaattaaacattagccagtccgggtaattcactattcgaattatattttcgctgcgatataaccttgagccacatcaacattgagtcagattattattcaaaccaacattcgcacacattttaagtattgctgatagaaaccattctcattatcattgtgttgttgattatttaatctctcctttgttggcaaatcatctggtctcatgtcgctgtcaaacgccccatgaggtagttatccagttaatgagaaacaagtaggcacctatgcaatacactccagatactgcgtggaaaatcactggcttttcccgtgaaatcagcccggcatatcgccaaaaactgctttctcttggcatgttacctggctcctcttttaatgtggtgcgcgtcgctccactcggcgaccccattcatatcgaaacccgtcgtgtgagcctggtattacgcaaaaaagatctggccttattagaagtggaagcggtttcctgttaatacggtgataacaacaatgaaaaaattaaccattggcttaattggtaatccaaattctggcaagacaacgttatttaaccagctcactggcagtcgtcagcgtgtaggtaactgggctggcgttaccgtcgaacgtaaagaagggcaattctccaccaccgatcatcaggtcacgctggtggacctgcccggcacctattctctgaccaccatcagtagccagaccagcctcgatgagcaaatcgcctgtcactacattttgagtggcgacgccgacctgctgattaacgtggtggatgcgtctaaccttgagcgtaacctgtacctgacgctacaactgctggaactcggcattccctgcattgtggcactgaacatgctcgacattgccgagaagcaaaatattcgtattgaaattgatgctctgagcgcgcgtctgggctgtccggtgatcccgctggttagtacccgtggtcgcggtattgaagcgctcaagctggcgattgatcgctataaagctaacgagaatgtggaactggtgcattacgcacagccgctgctcaacgaagcagatagtctggcaaaagtgatgccttccgacatcccgctgaaacaacgtcgctggctgggcctgcaaatgctggaaggcgatatctacagccgcgcctacgccggtgaagcgagccagcatctggatgccgccctcgcccgtctgcgtaatgagatggacgatccggcgctgcacattgccgatgcgcgttaccagtgcattgctgccatctgtgatgtggtaagcaacaccctgacggcagaacccagccgtttcaccactgcggtagataaaatcgtgctcaaccgtttcctcggtctgccgattttcctctttgtgatgtacctgatgttcctgctggctatcaacatcggcggggcgttacagccgctgtttgacgtcggctccgtggcgctatttgtgcatggtattcaatggattggctacacgctccacttcccggactggctgactatcttcctcgcccagggcctgggtggcggcattaacaccgtgctgccactggtgccgcagattggcatgatgtacctgttcctctccttccttgaggactccgggtatatggcgcgtgcggcgtttgtgatggaccgtctgatgcaggcgctgggcttgccggggaaatcctttgtgccgctgatcgtcggtttcggttgtaacgtaccgagcgtaatgggtgcacgtacgcttgatgcaccgcgtgaacgtctgatgaccatcatgatggcaccgtttatgtcctgcggcgcgcgtctggctatcttcgcagtattcgcggctgccttcttcgggcagaacggtgcgctggcggtcttcagcctgtatatgctgggtattgtgatggcggtgctgactggcctgatgctcaagtacaccatcatgcgcggtgaagcgacgccgtttgtcatggagttgccggtctatcatgtaccacacgttaaaagcctgattatccagacctggcagcgtctgaaaggcttcgttctgcgtgctggtaaagtgatcatcatcgtcagcattttcctgagcgctttcaacagcttcagcctgagcgggaaaatcgtcgataacatcaacgacagcgcgctggcgtccgtcagccgggtgatcaccccggtcttcaagccaattggcgtgcatgaagataactggcaggcaacggttggcctgtttacaggtgccatggcgaaagaagtggtagtgggtacgctcaacaccctctacaccgcagaaaatattcaggacgaagagttcaatccggcagaatttaacctcggtgaagagctgttcagtgcgatagatgaaacctggcagagcctgaaagacaccttcagccttagcgtactgatgaaccccattgaagccagcaaaggcgacggcgaaatgggtaccggggcgatgggcgtgatggatcagaaattcggtagcgcagcagcagcttacagctacctgattttcgtcctgctgtatgtaccatgtatcagcgtgatgggggctatcgcccgtgaaagtagccgtggctggatgggcttctccatcctgtgggggctgaatatcgcttacagtctggcaacattgttctatcaggtcgccagctacagtcagcatccaacttacagcctggtgtgcattctggcggttatcctgtttaacatcgtggttatcggtctgctgcgccgcgcgcgtagccgggtggatatcgaactactggcaacccgcaagagcgtaagcagttgctgcgcagccagcaccaccggtgattgccattaatggctagtcttattcaggtgcgcgatttgctggcgttacggggccgtatggaagcggcccagataagccagacattgaacactccacagccaatgattaacgccatgctgcaacaactggaaagtatgggcaaagccgtgcggattcaggaagaacctgacggctgcctctctggcagttgtaaaagctgcccggaaggaaaagcctgtctgcgcgagtggtgggcgctgcgttaaccttactccatcgcctgttttggaaagcccggtatgcgtctgcatccgggcttttttgcgtgcggctttccataaaaatgcaactcttgcagcacggcgtaagttcctttgaaagcatctcgcagggatgaaaactcgctaatacacaggtgtggagtggcgcgtagagtcgcggcattcaaacaacaggtgaaggaacgccatgagcaaaaagcagagttccaccccacacgatgcgctgttcaaactctttttacgccaaccggacacggctcgtgattttcttgcgtttcatttaccggcacccattcacgcgctttgtgatatgaaaaccctcaagctggagagcagcagctttattgatgacgatctgcgtgaaagctattccgatgtgctgtggagcgtgaaaacggaacaaggaccaggatacatctattgtctgattgaacatcaaagcaccagtaacaaactgatcgcatttcgcatgatgcgttacgctattgccgcaatgcaaaatcaccttgatgctggatacaaaacgttgccgatggtggtgccattgttgttttaccacggtattgaaagcccctatccctatagcctgtgttggctggattgtttcgccgatcccaaactggcaaggcagctttatgcctccgcatttccgctgattgatgtcaccgtcatgcctgatgatgaaatcatgcagcaccgacgtatggcgctgctggagttaattcaaaaacatattcgtcaacgcgacctgatggggctggtagagcaaatggcctgcttattaagtagtggatacgctaatgacagacaaatcaaagggctgtttaattacatactgcaaactggcgacgctgtacgttttaacgattttatcgacggcgttgccgaacgtagtccgaaacacaaggagagtttaatgactattgcggaaagattgcggcaggagggggaacaatccaaagccctgcatatagccaaaataatgcttgaatccggagttcctcttgcagacatcatgcgctttaccgggctgagtgaagaagagttggctgcggcgagtcagtaaagttctgtctcgccatttcaaaagccacttacaccctctgcttcaacgccaccagcaggtgacaaaactcggccggatggctaataaatggcgcatgggccgctttggcgaagatataactttcgctgtgaggccaaagtttatccagcatcggcaccactttgcgcggcaccagaccgtcgagatagccatacaatcgcaaaaacggcatggacacgttttgcagcggctgacggagatcgaccgttttcaggatttccagcccgccattaagcacgtcaacctccggcatcggtaacgccagaacggttttcttcaacgcccgcgcatcctggcgcgccgtttcagtccccatggtttgtaacgccaggaaccgctccactgtacgctgaaaatcatcactgagttgctgctgaaatcccgccagcacgtccggtcttatccccggccactcgtcacgagcactaaaacaaggactgctcgccacggtgaccagcgcctgaacacgctcgggatgggttaacgcaatctggcttgccaccagcccgcccagactccagcctaaccaaatggctttatcaggtgcctgttgcagcacggcttcggccatatcagcaagactcagcgcaccaaatccccggctacgcccgaagccgggcaggtcaacaaggtgcagcgtaaaatggctgctaagttcctcgtcaatgcaacgccacacttcggcattcagtccccatccgtgcagcagcacaagatgaacattcccctgacctttggtctgccaccagatgttattcatccgctattgttctcttttgacttacaaggatgaacatatgctaacagtaccgggattatgctggctatgccgaatgccactggcgttaggtcattgggggatttgtagcgtctgtagtcgcgccacccgcacagataaaacgttatgcccacaatgtggattacccgccacacactcccatcttccctgcggtcgctgcctgcaaaaaccgccgccctggcaaagactggtcacggttgccgactatgcgccgccgttaagtccgcttatccaccagcttaaattttcccggcgcagtgaaatcgccagcgccctgagtcgtctgttactattggaagtcttacacgctcgtcgcaccaccgggttgcaattgccggatcgcatcgtcagcgttccgttatggcagcggcgtcactggcgtcggggatttaatcagagcgatttgctgtgtcagccgttaagtcgctggttgcactgccaatgggatagcgaagccgtcacacgtacacgggccactgcgacccagcattttctcagtgcccggctgcgcaagcgcaacctgaaaaatgcctttcgtcttgaattgcccgtgcaaggtcgccatatggtgattgtggatgatgtcgttaccaccggaagtaccgtcgcagagattgcgcagttgcttttacgcaatggtgcggcggctgtccaggtctggtgcctttgtcgaaccttgtaaagcctcgatgatgggcgtattataaccaactaaaatagtcaactattaggccattactatgatccgtatttccgatgctgcacaagcgcactttgccaaactgctggcaaatcaggaagaagggacacaaatccgcgtatttgtgattaaccctggcacgcctaacgctgaatgtggcgtttcttattgtccgccggacgctgtggaagccaccgacacagccctgaaatttgacctgctgaccgcgtatgttgatgagttaagcgcaccatacctggaagatgcagagatcgattttgttaccgaccagttgggttcccagttaacgctgaaagccccgaacgccaaaatgcgtaaagtggcagacgatgcaccgctgatggagcgcgtggagtatatgctgcagagccagatcaacccacagcttgctggtcacggtggtcgcgttagcctgatggaaatcaccgaagacggttacgccattctgcaatttggcggtggctgtaacggttgttccatggtcgatgtgacgctgaaagaagggatcgagaagcagctgctgaacgaattcccggagctgaaaggtgtgcgcgatctcaccgaacaccagcgcggcgaacactcctactactaagttatcccctcttttgtagattgcccgatgcgacgctaaagcgtcatttcgggcctacgttgaacatgtgccagacgttggcgcagcattgctttgtcaaatcctcggttcgtttccccgcgataatatgaccaacctctcataatttaaatttaccccgctctggtgattctcaaacgccagatgttacccgtatcattcacatgggtaccaaacatactcctgacatctgactacaataattagttttagtgggtatcagtcgtggtgccgcaatatctctgttcccgattgggataattagagtttgtcgtcagaaaattgacgttacccataacaaatgaaaggccaggtaaatcatgccattagtcattgttgctatcggtgtaatcttgttgttgctcctgatgatccgcttcaaaatgaacggcttcatcgctctcgtcctcgtggcgcttgctgttggattaatgcaaggaatgccgctggataaagttattggctccatcaaagccggtgtcggcgggacgctcggtagccttgccctgatcatgggttttggcgcaatgctgggcaaaatgctggcagactgcggtggcgcacaacgtatcgccaccacgctgattgccaaatttggtaaaaaacacatccagtgggcggtggtactgaccggttttaccgttggttttgccctgttctatgaagtgggctttgtgctgatgctgccgctggtgtttaccatcgcggcttctgcgaatattccactgctgtatgttggtgtaccaatggcggctgcactgtctgtgacccacggcttcctgccaccgcatccgggtccgactgcgattgccaccattttcaatgccgatatgggtaaaaccctgctgtacggtactattctggcaatcccgaccgtgattctcgccggtccggtttacgctcgcgtgttgaaaggtatcgataagccaattccggaaggtctctacagcgcgaaaaccttcagcgaagaagagatgccgagctttggcgtcagcgtctggacctctctggtgccggtagtactgatggcgatgcgtgcgattgccgaaatgatcctgccgaaaggtcacgctttcctgccggtagcggagttcctcggtgacccggtaatggcaacgctgattgccgtgctgattgcgatgttcacctttggtctaaaccgtggtcgtagtatggatcagattaacgacacgctggtttcttccatcaaaatcattgcgatgatgctgttgatcatcggtggtggcggtgcgttcaagcaggtgctggtagacagcggcgtggacaaatacattgcttccatgatgcacgaaaccaacatttctccgctgctgatggcctggagcattgctgccgtactgcgtatcgcgctgggttccgcaaccgttgcggcaatcactgcgggtggtatcgcggcaccgctgattgcaacgacgggtgttagcccggagctgatggttattgcggttggttccggtagtgtgattttctctcatgtgaacgatccgggcttctggctgttcaaagagtactttaacctgactatcggcgagaccatcaaatcctggagcatgctggaaaccattatcagcgtgtgcggtctggtaggctgtctgctgctgaatatggtgatttgataacactgactgccggatgcggcgtgaccgccttatccggcctacgattcgggatgaattagtaggccggataagacgcgtcaagcatcgcatccggcatcaaccgcactttacttcttcttcgctgcagctctgcgccgtctgtccaaatccttcagcaacttgttcacgccatcatcggcaaacatgctctcaagcgttgcggaaagcttgcgtcgccagtttttatactggtaactggtgccaggaatattcaccggttcggccatatccagccagtcttccggctgtagtcctaacagagcactgttactgtcggcaatgtagcgctgcaaaccacggttcagcgtcggcgtcatgctcatcaagcttgccttatgcccggcacgtttcggcagacaaccatatttatgcagtgcatccagcagcccttgcttcgccagttcgcgatcctgatacagaccgcgcagtaccacttcatccggatacagccccagggttttgcccagcgttagatccccgcactcccagtaaccgcgcagcgttggcaggtcatgtgtcgccgcaaccgccatgctctgctccggatacgctttcggtgcacggaacgtcttctcgtggtcgttttcgaaatagagcactttgtaagagtacacaccgctgctgcgcagcttaccgacaatctctaccggtacggtaccgagatcttcaccaatcaccatacagcgatgacgtttactttcgagtgccagaatgctgagcagatcatccaccggatagtgaacatacgcgccctgatctgccgtctcgccatacggtatccaccacaaacgcagcatgctcatcacatggtcaattcgtaatgcgccgcagttttgcatattggcacgcaacagctcgataaacggttcataggcacgcgcggtgatgatatgcgggtccattggcggtaatccccagttctgccccaacgggccgaggatatccggcggcgcgccaacgcttgctttcaggcaatatagttcacggtcacaccaggtttccgccccaccttccgctacgccaaccgccagatcacgatacaagccaatcggcatttcatagccctggcttatctcccagcaggcggcaaactggctgtaagccagccactgcaaccagagataaaaatcgacgtcatcacgatgttcttcgcagaactgacgcacttctggactatccacgttctgatacatctctggccatgcaggccagccccagcgcatttcgtcctctttcacttgctgggcatgtagcgcatcaaaggctgcctgccagaacaggctgtcgccctgctctgcaacaaactggcgaaacgcggccatctgctcatcatcacgttgcgcgaaacctttccacgccattcgtaatgctgtcatttttagggcggtaaccgtggagtaatcgacccagtcggcatcgcgcgcctgttgcagcgtctgttgcgtggtcggcaactgccaccaggcctgagcctcttcgctaagatggaaatcttcaacggcgttaacgtcgatataaatcacattcagccaacggcgagaagacgggctgtatgggctggcgctctccggatttgccggatagagcgcatgaatcgggttcaggccaatgaagctcccgccacgttttgccacatccaccagcatcgctttgagatcgccaaaatccccaataccccagtttttttcgcttcgcagcgtataaagctgaacgcaggcaccccacagcttttgtttattcagcaacgcctgcggttcgtaacagcgtttcggggcgacaatcacccggcaatgcgcgcgctggtcgtcctgggtgagtgtcagcgtgtgataaccttccggcagcttcgtcggtagattgaacgctttgccccccgttacatggcctttgtactgcgttccttcttcggtggtcagcagccagctatattcgccgctgccctccaccaccatcggcatttttttgccgctggtataaaccatgacattcgggactggcgttaccgccactttcgtggcggtacgttgatgcatcgcgtcaagcaaacgccgtttggtttcggcgctaatgctctgcggtttaccgtgggcattgatgtaattggggctaatccccgccgccagcgcggcattatccagacgtttgctttccatcgagcttccttagcgttttgcctgccagatacgagcctgataatcgcgaatagagcgatcgctgctaaacataccgcagcgggcggtattgaggatcgccgcgcgagtccaggcctcctggtcgcggtacagcacatccacctgcttttgtgcctctacataggctgcgaaatccgccatcaccagatacggatcgccgccctgtttgccgatactgtgcagcatctagtcgaaggcatgcttatcgccgtcgctgtatttaccgctttccagctctttcaatactgcgtccagcaccttatctttcttccgccatttcaccgggtcgtagcctttggccagaattgccttcacttgttccacggtatgaccaaaaataaagatattttcttcaccgactttctcggcgatttcaacgttcgccccatccagcgtaccgacagtaagcgcaccattgagcgccagtttcatattgccggtaccggaagcttctttacctgcagtgctaatttgttcggagatatccgccgccgggatcagtttttccgccgcgctaacgcaataatccggcaggaacaccaccttcaacttatcgccaaccagcggatcgttgttgatcacgtcagccactttgttgatcgcaaagataatattcttcgccaggtagtagcccggtgccgctttcgcgccgaagaggaagacgcgcggtacgcgatcagcctgcgggttttcacgaatttctttgtacaacgccagaatatgcagcagattcaggtgctggcgtttgtactcatgcaaacgtttgatctgaatatcgaaaatcgcctgtggattgatctcaataccggtacgaactttcacaaactccgccagacggactttattcgcctgcttgatctcgcgatattgctgacggaatttcgcatcatcagcgaatttttccagattgatcagctgatcgagatcgttagcccactctttttgcagacttttatccaacagagccgccagtgccgggttgcactgtttgatccagcgacgtggggtaataccgttggtgacgttatggaatttgttcggccatagctggtgatattccgggaacagatctttcaccaccagatcgctgtgcagcgccgcaacaccgttcaccgcgaaaccgccaaccacacacaggttcgccatatgcacttgtttgtcgtgcaccaccgccagtttggcccacactttttcatcgcccggccaggttttctctaccagcgttttaaagcgagtattaatttcgttaataatctgcatgtggcgcggcagtaagcctttcaccagtttcacatcccagcgttccagcgcttctggcatcagggtatggttggtgtaagcgaaagttttgctggtaatggcccaggcgtcatcccagctcatctggtgctcatcgatcagcacgcgcagcagttctggaatcgcgatagttgggtgggtatcgttcagctgaataacttcgtaatccgccagttcgtgcagtttacgccccgccagatgatggcgacgcaaaatatccgctacgctacaggcacactggaagtattgctgcatcaggcgcagctttttaccggcagtatggttgtcgtttggatagagaactttggtcagtttttccgcattgatgccctgctgttcggcacgcaagaaatcaccgtcgttaaatttagtcagatcaaacggatgcgcgtgcgtcgcctgccacagacgcagcggctgcgccacgccattacgatagccgacaacggggagatcccacgcttgaccggtaatggtaaactccggctcccagcgtccgtctttcgtcactttaccgccaatccctacctgcacatccagtgcttcgttgtggcggaaccacgggtagttactgcgatgccagtcatccggcgcttcaacctgtttgccatcgacaaaagactggcggaacaaaccatattgatagttcagaccgtaacccgtcgcagactgaccgacagttgccatactgtcgaggaagcacgccgccagacgtcccagaccaccgttacccagcgccgggtcgatctcttcttccagcaggtccgtcagattgatgtcataagccttcaagctatcctgtacatcctgataccagccgagattcaacaggttgttgcccgtcaggcgaccaatcaaaaactccatactgatgtagttaacatgtcgctgattcgccaccggcttggcgaatggctgagcacgcagcatttcggccagtgcttcactcactgctagccaccactggcgaggagtcatttcagccgcagaatttaagccataacgctgccactgacgactaagcgcttcctgaaattgcttatcgttaaaaataggttgactcataggagttccacttttcttagattttcaacacaacgttatcgctagtttgccaggctcgatgttgaccttcctcatcctgcgggggattaggcagggaggagttgcggggatgagcaaggaaatgtgatctcaaccacttaaagctagtgcaaaccacaggattagcatcaaatcaatgcaatacagcgcagaaaatctgtatctaagtgcaaaaaatggccgttgcgtattttcaaaaagcggaaggtaactctataaattaagtaaaggagtgaaacagtttcataagtaaaatatccagtgtgctccatctcattcttaatagatttattaagatcatctttttagatggcactttcatcaggaatgaagaagaaacccttgcttaaatgaatctgatgaacataagggaaaccagtattcacgctggatcagcgtcgttttaggtgagttgttaataaagatttggaattgtgacacagtgcaaattcagacacataaaaaaacgtcatcgcttgcattagaaaggtttctggccgaccttataaccattaattacgaagcgcaaaaaaaataatatttcctcattttccacagtgaagtgattaactatgctgattccgagtaaactaagtcgtccggttcgactcgaccataccgtggttcgtgagcgcctgctggctaaactttccggcgcgaacaacttccggctggcgctgatcacgagtcctgcgggctacggaaagaccaccctcatttcccagtgggcggcaggcaaaaacgatatcggctggtacagcctggatgaaggtgataaccagcaagagcgtttcgccagctatctcattgccgccgtgcagcaggcaaccaacggtcactgtgcgatatgtgagacgatggcgcaaaaacggcaatatgccagcctgacgagtctcttcgcccagcttttcattgagctggcggaatggcatagcccactttatctggtcatcgatgactatcatctgatcactaatccagtgatccacgagagtatgcgcttctttattcgccatcaaccagaaaatctcaccctggtggtgttgagtcgcaaccttccgcaactgggcattgccaatctgcgtgttcgtgatcaactgctggaaattggcagtcagcaactggcatttacccatcaggaagcgaagcagttttttgattgccgtctgagtagcccgattgaagccgcagaaagcagtcggatttgcgatgacgtttccggttgggcgacggcactacagctaatcgccctctccgcccggcagaatacccacagtgcccataagagcgcacgccgcctggcgggaatcaatgccagccatcttagcgattatctggtcgatgaggttttggataacgtcgatctcgcaacgcgccattttctgttgaaaagcgccattttgcgcagtatgaacgatgccctcatcacccgtgtgaccggcgaagaaaacgggcaaatgcgcctcgaagagattgagcgtcaggggctgtttttacagcggatggatgataccggcgagtggttctgctatcacccgctgtttggtaacttcctgcgccagcgctgccagtgggaactggcggcggagctgccggaaatccaccgtgccgccgcagaaagctggatggcccagggatttcccagcgaagcaattcatcatgcgctggcggcaggcgatgcgctgatgctgcgcgatattctgcttaatcacgcctggagtctgttcaaccatagcgaactgagcctgctggaagagagccttaaggccctgccgtgggacagcttgctggaaaatccgcagttggtgttattgcaggcgtggctgatgcaaagccaacatcgctacggcgaagttaacaccctgctagcccgtgctgaacatgaaatcaaggacatcagagaagacaccatgcacgcagaatttaacgctctgcgcgcccaggtggcgattaacgatggtaatccggatgaagcggaacggctggcaaaactggcactggaagagctgccgccgggctggttctatagccgcattgtggcaaccagcgtgctgggtgaagtgctgcactgcaaaggcgaattgacccgcagtctggcgctaatgcagcaaaccgaacagatggcacgccagcacgatgtctggcactacgctttgtggagtttaatccagcaaagtgaaattctgtttgcccaagggttcctgcaaaccgcgtgggaaacgcaggaaaaagcattccagctgatcaacgagcagcatctggaacagctgccaatgcatgagtttctggtgcgcattcgtgcgcagctgttatgggcctgggcgcggctggatgaagccgaagcgagcgcgcgtagcgggattgaagtcttgagctcttatcagccacagcaacagcttcagtgcctggcaatgttgattcaatgcagcctggcccgtggtgatttagataacgcccgtagccagctgaaccgtctggaaaacctgctggggaatggcaaatatcacagcgactggatctctaacgccaacaaagtccgggtgatttactggcaaatgaccggcgataaagccgccgctgccaactggttgcgtcatacggctaaaccagagtttgcgaacaaccacttcctgcaaggtcaatggcgcaacattgcccgtgcacaaatcttgctgggcgagtttgaaccggcagaaattgttctcgaagaactcaatgaaaatgcccggagtctgcggttgatgagcgatctcaaccgtaacctgttgctgcttaatcaactgtactggcaggccggacgtaaaagtgacgcccagcgcgtgttgctggacgcattaaaactggcgaatcgcaccggatttatcagccattttgtcatcgaaggcgaagcgatggcgcaacaactgcgtcagctgattcagcttaatacgctgccggaactggaacagcatcgcgcgcagcgtattctgcgagaaatcaatcaacatcatcggcataaattcgcccatttcgatgagaatttcgttgaacgtctgctaaatcatcctgaagtacctgaactgatccgcaccagcccgctgacgcaacgtgaatggcaggtactggggctgatctactctggttacagcaatgagcaaattgccggagaactggaagtcgcggcaaccaccatcaaaacgcatatccgcaatctgtatcagaaactcggcgtggcccatcgccaggatgcggtacaacacgcccagcaattgctgaagatgatggggtacggcgtgtaagtttagccggataacgcgccagatccggcttacatctctgcatcattcaatgctcacccgcgttacgccatctgtttctatcaaactaaaccgcaccggcaagaaacgctccaccaccgcgatattggtcagcagatggcaactgggatgggcgaccgtaaattcccccgcgcccgccagcgccatcggtagcaccagttggtcagcaagatattcccccaccgccgccgtgcttgccaggtagcgtttcacctctttcaccaactgtgccgcaaccacctcggcactgacgcgcttttcaccgacgacaaaaaagcgttcggtgatattttcactttcgacttcaaggctgacggtattacccggcccctggtcgcgcggcaggttatgaatattctgttcatgcagggaaaaactccccgccagtgtagcgatttcacgctcagcaacatggcgcggcacaccagctaatagaacttctccacgcatctgcacaatgttcccgcgctcgccaagttgcaaggtgttaaagcttgccacggggctgacttccgttgccaccacaccgcctccggcagggtaaaaaccgtggcgtaacagcgtggtttgctgatgaattcctattttcgccagcagcggctccagcacccggcggataaaatccgcaggcggcgcgctcgggttatcggtgccgccgctcacttcaacacggctaggtccatcggcaaaccacagcgcgggcagcaccgtttgcagcaccagcgtacaacttccggcgctaccgatagcaaagcggtaatcgccgccgcgcacggtgccgggccggaagagcagacgctggctccccagctccgcgccttccacggttgctccgcaaatttccgtcgccgcctttaccgcggtcagatgctggcgcaacagccccggtttcgcccgcccggcacgaatgctggtgatggtaaatggctggccggttatcatgctcaggctcagcgcgctgcgcaggatctgcccgccaccttcgccctgtgcgccatccagcgcaatcatccttttcatcatttatccttttacgcacaccacctgacgcagggtatagataacttccaccagatcgctttgtgccgccatcaccgcatcaatatctttatacgccatcgggatttcgtcgatcacttcggcatctttacggcattccacatgcgcggtggcacgaatttgatcttccacgctgaacagttttttcgctttagttcggctcattacccgcccggcaccgtggctgcagctacagaagctctcttcatttcccagcccacggacgataaagctttttgctcccatgctaccgggaataattccatattgaccagcacgcgcagacaccgcgcctttacgcgtcacgtagatctcttcaccaaagtgctgttctttttgcacatagttgtggtgacagttgatctcttccatcgccagcgtttgtggctgtctgaccgttttctgcgtaatgctctgcaatgccgttaccacgttttccatcatcgcatcgcggttaaggctggcaaaaagctgcgcccaggccacggctttcaggtaatcatcaaagtattccgtaccttccataaagtacgccagatcacggctcggcaacgtctcaagcgtttcctgcatctctttttgtgccagatcgataaagtaagtcccgatggcgttaccaattccgcgactaccggagtgcagcataatccacacctggtcgctctcatcaaggcagatttcaataaagtggttaccggttcccagcgttcccaggtgtttatagttattggtattcaggaaacggggatatttttgcgttaaccactgataaccggcttcaagctcagcccatttagcatcgacgttaacaggtggattttcccaggcacctttatcacgtttacaacggccagtggtacgcccgtgcggcacggccgtttcaatcgcctgacgcagctctgccaggttttcaggcaggtcttccgccgttaacgcggtacgcagcgcgttcattccacagccaatatccacgcccaccgccgccggaataatcgcccctttggtcgggatcacgctaccaatggtggaacctttacccaggtgtacatcaggcattaccgcaatatgtttgaaaataaacggcatcttcgccgtattaataagttgctgacgcgcatcggcctctaccggcacgcctttggtccacatttttaccggggcattttcagtggtcagtaattcgtaattcattttgtttttctcttttcgttgtttgctgtcctgataattgcaaccgtcgtgccagaaaattaaataagcagcttaattttttaattcattgttttaaaaaagattatatctttacgtccgtaaccggagatttcccgcaaagccaatttaccgataatgaaatatcgtcttttataaggatatctaagatgcgtaaaacagtggcttttggctttgtcggtaccgtactggattatgccgggcgcggcagtcagcgctggagtaaatggcgtccgacactctgtttatgccagcaagaaagcttggtcatcgatcgactggaattgttgcacgacgcccgcagccgcagcctatttgaaacgcttaaacgcgatatcgccagtgttagcccagaaacagaagtggtgagcgttgagattgaactgcataacccgtgggatttcgaagaggtctacgcctgcctgcatgatttcgcccgtggttacgagtttcagccagaaaaagaagactatttaattcacatcaccaccggtacccacgtcgcgcagatttgctggtttctgctggcagaagcgcgttacctgcccgcccggctgatacaatctagtcctccgcgcaaaaaagaacagccgcgcggcccaggtgaagtaacgattatcgatctcgatttaagccgttataacgccatcgccagccgctttgccgaggaacgccagcaaacgcttgattttcttaagtccggcattgccacgcgtaacccccacttcaaccgcatgattgagcagatcgaaaaagtggcgatcaaatcccgcgcgccgattctgcttaacggtccaaccggcgcgggcaagagttttctggcgcgacgcatcttagagttaaaacaggcgcggcatcagtttagcggcgcgtttgtggaagtgaactgcgccaccctgcgcggcgataccgccatgagcacgctgtttggtcatgtaaaaggcgcgtttaccggggcgcgggaatctcgtgaaggtttattacgcagcgccaacggcggaatgttgtttcttgatgagattggcgaactgggcgcagacgaacaggcaatgctgctgaaagccattgaagagaaaaccttttacccgtttggcagcgatcgccaggtgagcagtgattttcagcttatcgccggaacggtgcgcgatttgcgccagctggttgccgaaggcaaatttcgcgaagatctgtacgcgcggatcaatctctggaccttcaccctgccgggtctacgccagcgccaggaagatattgaaccgaacctggattatgaagtggagcgccacgccagtctcactggcgacagcgtgcgttttaacaccgaagcgcggcgcgcctggttggcttttgcgacctctccccaggcaacatggcgcggtaactttcgcgaactttctgccagcgtcacgcggatggccacctttgccactagcggacgcatcactctggacgtggttgaagatgagataaaccgtctgcgctataactggcaggagagccgcccctccgcgcttacggcgttgctgggcgcagaggcagaaaacatcgatctcttcgaccgtatgcaactggaacacgttatcgctatctgccgccaggcaaagagcctttccgcagccggacgccagctttttgacgttagccgccagggcaaagccagcgtcaatgacgcggatcggctacgcaaatacctggcgcgttttggtctgacgtgggaagccgtgcaggatcagcacagctccagttgaatatggtggtccgtcagcacctgcatcacgcttactggcggcggggcgtcggtgtagacggcatctaccatgctgatgctgcccatattgaccatcgcgttacggccaaatttcgagtgatcgacaaccagcataacgtggcgcgagttctcaataatggcgcgtttggtgcgaacttcgtggtaatcgaactccagcagcgagccgtcgctatcgatgccgcttatccccagaatgccgaaatcaaggcggaactgggagataaaatcgagcgtcgcttcgccaatgatcccgccatcgcggctgcgtaattcgccaccggcgagaatgatgcgaaaatcttcttttaccatcaacgtgttagcaacgttgagattgttggtgacaatgcgcaaattgctgtgattgagcagtgcgtgcgctaccgcttccggcgtggtgccgatatcgataaacagcgtcgagccattggggatttgctccgccactttgcgggcgatgcgctctttttcttcggtctgggtggccttgcgatcgtgccacggcgtgttaaccgaactggaaggcagcgccgcaccgccatgatggccaggatcaggttttgctccgccagctcattgaggtcgcggcgaatagtctgcgggctgacggagaaatgctctaccagctcttcggtactgacataaccctgctgtttaaccagttcgataataccgttgtgacgttgtgtttgtttcatttataaatccctggaattattttcgttttcgcgcattgaggctatcaacaaaagccatcgctaaacccacggctaacccggcgatgtgtgctccgttcgccatgctcatcccaaacaaatcaaaccatccggcgacaatccagatcagcgcaaagataattaacccacgttgcaggtaaatgccactttgcggatcgcgttcgccacgtagccagacgtagcccatcagcgcatacaccacgccagaaagcccgccaaaccacggcccgctgaatttttgctgcacatagccgcttaacagggcgctgataagcgtaatgacaattagcttaccgctaccgaggcgtttttccaccgcaccgccgagataccaccaccagagcaggttaaagaggatatgcatcaggctgaagtgcattaacgcgtgggtgaagtaacgccagaactcaaatttcagtgttggatcgaatggccaggccagccataacatcacttcctgatcgccgagaatttgcatggcaataaacaccaccacgcaggcgatcatcatcacccaggttaccggacctgcgcgttcacgcaaggcggcaaagaaaggataacggcgataatgcaggccactgccggtatggcctgcctgccagctcgccgccagataacgcggatctgccgggttttcgagaaaacgcgccagctccgcccgtacgcgctcggcctgggactcatccgccagccagacatcgctttggttatgttgttgaatcgtgaggataacaccctgcgtcgccatgtaatcaacaaacgcctgcgccacgcgggggttagcaaaagaggtaatcatcaacatcgttgctgtcgcttattccacacaaaaggggacagtataaagcgttacgcgccgtacgccacctctgcgggaaactgacgttgccaggcttcaaagccgccgtcaatgctatagaccacatcgtagccctgttgcagcagatactgcgccgcgcctttgctgctattgccgtgataacacatcaccatcaccggagtgtcaaagtcgttatcacgcataaaagcgcccagcgtgtcgttggttaaatggaaagcctgcaccgcatgtcccattgcgaaactctgtggatcgcgaatatcgaccagcaccgcctctttttcctgcaacttctggtgcgcgtcggcaacgttaatacattcgaactgatccatgcgtctctctttctttacaaacaagtgggcaaatttaccgcacagtttacgtcgaagcggcagataaacgccataatgttatacatatcactctaaaatgttttttcaatgttacctaaagcgcgattctttgctaatatgttcgataacgaacatttatgagctttaacgaaagtgaatgagggcagcatggaaaccaaagatctgattgtgatagggggcggcatcaatggtgctggtatcgcggcagacgccgctggacgcggtttatccgtgctgatgctggaggcgcaggatctcgcttgcgcgacctcttccgccagtagtaaactcattcacggtggcctgcgctaccttgagcactatgaattccgcctggtcagcgaggcgctggctgaacgtgaagtgctgctgaaaatggccccgcatatcgccttcccgatgcgttttcgcctgccacatcgtccgcatctgcgcccggcgtggatgattcgcattggtctgtttatgtacgatcatctgggtaaacgcaccagcttgccgggaagtactggtttgcgttttggcgcaaatagtgtgttaaaaccggaaattaagcgcggattcgaatattctgactgttgggtagacgacgcccgtctggtactcgccaacgcccagatggtggtgcgtaaaggcggcgaagtgcttactcggactcgcgccacctctgctcgccgcgaaaacggcctgtggattgtggaagcggaagatatcgataccggcaaaaaatatagctggcaagcgcgcggcttggttaacgccaccggcccgtgggtgaaacagttcttcgacgacgggatgcatctgcctagcccttatggcattcgcctgatcaaaggcagccatattgtggtgccgcgcgtgcatacccagaagcaagcctacattctgcaaaacgaagataaacgtattgtgttcgtgatcccgtggatggacgagttttccatcatcggcactaccgatgtcgagtacaaaggcgatccgaaagcggtgaagattgaagagagtgaaatcaattacctgctgaatgtgtataacacgcactttaaaaagcagttaagccgtgacgatatcgtctggacctactccggtgtgcgtccgctgtgtgatgatgagtccgacagcccgcaggctattacccgtgattacacccttgatattcatgatgaaaatggcaaagcaccgctgctgagcgtattcggcggtaagctgaccacctaccgaaaactggcggaacatgcgctggaaaaactaacgccgtattatcagggtattggcccggcatggacgaaagagagtgtgctaccgggtggcgccattgaaggcgaccgcgacgattatgccgctcgcctgcgccgccgctatccgttcctgactgaaagcctggcgcgtcattacgctcgcacttacggcagcaacagcgagctgctgctcggcaatgcgggaacggtaagcgatctcggggaagatttcggtcatgagttctacgaagcggagctgaaatacctggtggatcacgaatgggtccgccgcgccgacgacgccctgtggcgtcgcacaaaacaaggcatgtggctaaatgcggatcaacaatctcgtgtgagtcagtggctggtggagtatacgcagcagaggttaagcctggcgagctaaattaacgtaaggtgatcaggtcagatttcaatctggcctgagactgatgacaaacacaaaactgcctgatgcgctacgcttatcaggcctacgtggtttatgcaatatattgaatttgcatggtcttgtaggccagataagacgttcacgtcgcatccggcatgaacaaagcgcactttgtcaaaaatctaacctactttttaattcagggaattaccgcaaagcccacgccatcatacccaacgtaacaaaactcaggcacgttccccactcgcccgctgaaaaatagcattaatgcgcccagcgccagcataaaaattttgagcagaaggtaaattgttggcgtgataaggatattacaaacttcaataataccggcaagtccgacacccagcatggcaataaccaccgccaaaaattgcgccagtatggggatgccgaaaaaagtcattaccaggctggtcaaaatccattttctgttttgcattattctttccattctttttgaatggtgaaattatactccccgagtccccttgccccttctggacacttttccgaaatgatggcggaaaaaaacgggaccctttggccccgttctatttattggtgaacttacaatctcaccggatcgatatgccagatatgatcggcgtactctttgatagtacggtcagaagagaagtagcccatattggcaatgttcagcatcgcttttgcggtccactcttcctgaagctcgtagagttcatcgactttatcctgacaatcgacatagctgcgataatccgccagtacctggtagtgatcgccgaagttgatcaggctatcaaccagatcgcgatagcgacccggatcttccggactgaatacaccgctgccgatttgcgtcagcacctgatgcagctcctcatctttctcgtagtattcacgcggtttgtagccctgacgacgcagttcttccacttcttccgctgtgttaccaaaaataaagatattgtcagcaccgacatgatccagcatctcgacattcgcaccgtccaacgtaccgatagtcagcgcaccgttaagcgcaaacttcatgttactggtgccggaagcttccgtccctgccaggctaatctgttcagacagatctgccgccggaatgatcaactgcgccaggctaacgctgtagttcgggatgaacacgactttcagcttatcgccaatctgcggatcgttgttgatcactttcgctacgtcattgatcaaatgaataatgtgcttcgccatgtaataggcgctagccgccttaccgccaaaaatattcacgcgcggtacccacttcgcatccgggtcggccttgatgcggttatagcgggtaatcacatgcaacacattcatcaattgacgtttgtattcgtgaatacgtttgatttgtacatcgaacaacgcctttggattcaccaccacattcagctgctgggcgatatactctgccagacgctttttgttctccagcttcgcctgatgcacagcgtgattaaccattgggaaatcacagtgttgttgcagctcattaagcaggctaaggtcggtgcgccagttacggcccaggtgttcgtccagcacggcactaaggcttgggttcgctaccgccagccagcgacgcggcgtcacaccgttggtgacgttggtgaaacgacccgggaagattttcgcaaagtcggcaaacaagctttgcaccatcagattagagtgcagttcgcttacaccgttaactttgtggctcacaacaaccgccagccaggccatacgcacacgacgaccgttggattcatcaatgatgctcgcccgtcccagcagatcggtatcgttcggatactgttcctgcaaggttttcaggaaatagtcgttgatttcaaagatgatctgcaggtgacgcggcagaattttacccagcatatcaaccggccaggtttccagcgcctcgctcatcagcgtgtggttagtgtaggagaagacctgacaacacacctcaaacgcgtcgtcccagctaaattggtgctcatcgatcagcagacgcatcatctcaggaatgctcagtaccggatgggtatcattgagatgaatcgcgattttatccgccaggttatcgtaggttttatgcaactgataatggcggcttaaaatgtcctgaatggtgctggaaaccaggaagtattcctgacgcaggcgcagctcacgcccggagtaggtggagtcatccggatacagtacgcgagatacgttctcggagtggtttttatcttccactgccgcgaagtagtcaccctggttgaatttaccgaggttaatttcgctactggcttgcgcactccacaaacgcagcgtgttggtcgcgtcggtgtcgtaaccagggattatctgatcgtaagcgactcccagaatctcttcggtttcaatccagcgcgtttttttaccttcctgctgaatgcgaccgccaaaacggactttatagcgcgtgttgtggcgtttgaattcccacgggttaccgtattccagccagtagtctgggctctctttctggctaccgttaacgatgttctgcttgaacataccgtagtcatagcggatgccgtaaccgcgccccggcaaccctaacgtcgccagagaatcaaggaagcaagccgccagacgtcccaggccaccgttaccgaggcctgggtcattttcttcatcaatcagctcttcgagatttaaccccatcgcttccagtgcgccctgtacatcttcgtaaattcctaggctcaacatggcgttggagagcgtacggccaatcaaaaactccatgctcaggtagtaaacctgacgagtttcttggctcaactgggcacggttactacgtaaccagcgctccacgagacgatcgcgcacagcaaataacgttgcgttcagccattcatgtttattggcgacgaccgggtcctttccaatcgtaaacatcagcttgtaagcgatagagtgcttaagagcttctacgctaagcgtggggctactatatgtaaacggagcattcatataggcgtttcctgaaaattatttcaagcgatagtaaagctcacggtagctcttcgccgcgacctgccagctaaaatccattgccatagcctgacgttgcacaaaccgccacagactaggacgggaccacagtacaaaagcacgtcgaatagcccgtaacaggctccaggcattactatcttcaaagacaaacccactggcgacgccatctgcaaggttctcaagagaacagtcagaaaccgtatcagcaagcccaccggtgcgccgcactaacggcagcgtaccgtacttcaatccataaagttgcgttaagccgcacggttcaaaacggctgggcaccagaatgacgtccgcgccgcccataatgcgatggctaaatgcttcgtgatagccaatctgaacgcccacctgaccggggtattccgctgccgccgcaaggaaaccttcctgcagcaccggatcgcccgcgccgagtagcgccagctgcccgccctgctccagaagacccggtaaggcttccagcaccaggtcgagacctttctggctggtcagacggctcaccactgcaaaaagcggcactttatcgtcaaccttaagccccattgcgatttgtaactggcgcttattttccgctttatcttccaacgtatcgcgggtgtaacggctggccaacagtaagtccgtctctggactccagattttctcgtccacgccgttcagtacgccggaaagacgcccttcacggtgacgctgttgcaacagaccttccataccgtaggcaaactgcggttcggtgatctcgcgagcgtaggttggactgaccgccgtaatgtgatcggcatagtacagaccggccttcaggaaagagatttgtccgttgaattccagcccatgaatattaaagaaactccatggcaattggatgtcattcatgtgatgtgcataaaacatgccttgataggccaggttgtgcacagtaaacacgctcttcgccggacgcccgcgcgccgccagatacgcaggcgcaaggcctgcatgccagtcgtgcgcatgcaccacatcaggacgccagaatgggtcaagcccgctggccatttctgccccaacccaccccagcagcgcaaaacgcaatacgttgtcggtataggcaaataagttggtatcgtgatacgggcttcccggacgatcatagagatgcggcgcgtcaatcaggtaaatgccaaccccgttgtaatgaccgaacaacagcgtgatatgtccggcgaaggtatcacgacgggatactacctgcgcatcggtcacgccacggcgaatatcgggaaatgcaggcaacagtacgcgagcgtcaacgccgtctgcgatttgtgctgcgggtaatgccccaataacatcagccagaccgccggttttaagcagcgggaacatctcactacatacatgtaaaacctgcattatcgctcctgtttatgccctaacttccgtagcatttcgcgcgttaccagcacgatgccttcttcactacgatagaaacgacgtgcatcttcctctgcgttttcaccaatcaccatgccttccggaataacacaagcacgatcgatgacgcagcggcgcagacggcagctgcgacctacccatacttccggtaacaatacggcggaatcaatgttgcagaaactattcacgcgaacgcggctgaacagaacggactgcaccaccacgctaccggagatcacacaaccgccggaaaccagactgttaagggtcatcccgtggctaccggagcgatcctgcacgaatttcgctggcggtaaactttcattgtaggtgcgaattggccaattgcgatcgtacatatccagttccggcaccacagaggccagatcgaggttcgctttccagtaagcttccagcgtacccacatcgcgccagtacggctcggcatccgggtcggattgtacgcaagagagcgggaacgggtgcgcataggccagaccggcttcggtgatcttgggaatcaaatctttgccaaagtcgtggctggagttctcatcgcgatcgtcttcttccagcagttcatacagatagtcggcgtcaaagacgtagatacccatactcgccagagatttgctcggatcgttcggcatactcggcgggttagcaggtttttcaacgaattcgataattttatcgttctcatcaaccgccataacgccaaatgcggaggcttcttcaatcggtactggcatacaagcaacggtgcaacgtgcgcctttttcgacgtgatcgataagcatacggctgtagtcttgcttgtagatatggtcgcccgccaggatcaccacgtattccgctttataacggcggataatgtcgaggttttgggtgaccgcatctgcggtgccgcgataccagttttcccctttcattctctgctgtgctggcagcagatcgacaaactcgttcatttcttcattgaagaaactccagccgcgctgaatgtgctgcaccagagtgtgggactggtactgggtgatcacgcccatacgacggatcccggagttgatgcagttagacagcgcaaagtcgataatgcggaacttaccgccgaagtgtacggccggttttgctcgcttattggttaaatccttcaggcgggtaccacgtcctcccgccagtatcagggcaacagatttcaatggcagctggcgcgccaacattaagtgatcgttcttctctaaactaaccatgactaactccttttttatcatctctggaacacacacaatccgtgtgcaggtccctgccagacagccgtaatcactgggttatcctctccagcgaatgggggaatggcgtgccactccccagcaggtaaaacaatctctgttacctcaagcgtggcgttaattgcgatcaaaaagcgatcgctgagcagaatttgcagctgtttcggcccgttttgccactcatccgtgcttaaaggttgagcatatcgatttagccaacggacattgccgtcgccttcttcccaccagcgattctccaccaaagcgggaatgcgcttgcgcagatggattaacgcggcggtaaatgcggttaaaccactgcttgcctggctccagtccaaccaggttaattggttatcctgacagtaggcattgttattgccatgctggctgtgaccatgttcgtcaccggccagtaacatcggcgtaccctgggagagcaacaacgttgttaacagggcgtgaatgctgtcgcgccgccgttcaaccaggtcaagagaaccgcctaacccttctttaccatgattgttactgtaattgttgttggtcccgtcgcgattttcttctccgtttgcttcattgtgtttatggttgaagcaaacgcagtcgcgaagcgtaaaaccgtcatgcgcggtgacgagattaatcgcggcactcggcagacgaccattacgtttaaaaacatcgctggaggcagcaaaacgcccggcaaacgcccccagaggcaaatcataatgtagccagaaacgacgggcagcatcgcggaaatgatcgttccactcggcaaacagcggcgggaaatttcccacctgataaccaccaggagcgatatcccacggttcagcaattaacttcacctggctgagcaccgggcagttctggatagcggtaaacaacggcgcatcctgacggaactctggcgtacggcccatgactgccgccagatcaaagcggaaaccatcgacgtggcaggtttctacccaataacgcaggcaggcgctggcataatccaccaccgccggatgactcaaattgagcgtgttgccgcaaccggtccagttgtgataatcgccgtcttctcttatccaataatagctacggttatcgatcccacgcaggctgaataacgggccgtcgaggtccagttccgcactatggttgagcacgatatcaagaatgacttcgatacccgctttatgcagtgctttgattgcatcgcgaaactcatccagcgccgtttctgggctgcaggcatacgccggatgcagcgcaaacatcgccaccgggttgtaaccccagtagttacttagccccatgcgttgcagacgtggttcactggcaaactgcgccactggcagcagttccagcgcggtaatgcccaattgtttcaaatagttgatcatcaccggatgcccgagggctttataagtgccacggatctcgaccgggatctccgggtgcaagtacgttaatcctttgacatgggcttcataaatgatggtgctgccccacggcgtgcgcggcggggcatcatcttcccagtcatagtgatcaaccaccactacgcatttcggcgcaatggcggcgttgtcgcgatagtcaggttcattatgaccggcgtgcagcagcgggttatctttaaactccccgtcaatttgccgcgcgcaaggatcaatcaacaacttcgccgggttaaagcgatgcccctcggcgggttgccaggggccatgaacgcgataaccataacgcaaacccgggcgcgcatccggcagataaccgtgccaaatgtcgccactgtgccctggcaagtcatagcgatgttcctggccattggcgtcaaagacacacagttctacccgctcggcatgagcggagaaaagtgtgaagttgacgccctgaccgtcgtaatgcgcgccgaggggagcgggtttgccaatggcgagttgtgtcattctgcctcccgaaccagccagatagtggccagcggtggtagcgtcaggcttagactatgctgacgaccgtggctggcaatctcatcgctgtgtaccgtgccgccattgcctgcattactgccgtgatagtgcatggaatcggtattgaggatttcacgccatttgcccggctggtttatgccgaagcgataatcatgacgcggtaccggcgtaaagttactggcaacgatgatttcgttaccctctttatcgcgacgcacaaagatcagcacgctgcgttctttgtcatccaccaccagccattcaaagccgtacgggtcaaaatccagttcatgcattgctttatggtggcggtaggtgaggttcagatcgcgcaccagacgctggacaccgtggtgccagttatcgccgccttccaacagatgccagtcgaggctggcgtcatggttccactcgcggccctgggcaaattcgttacccatgaacagtagtttcttgcccgggaatgcccacatccagccatagtaggcgcgcaggttcgcgaatttctgccatgcgtcgcccggcatgcggtcgagaatgctttttttaccgtggaccacttcatcatggctcaacggcaggacgaagttttcagtgtagttgtagagaatcccgaaggtcagtttatcgtgatgatactgacgataaaccgggtcgagcttcatgtagtccagggtgtcatgcatccagccgaggttccacttgtaccagaagcccagaccgcccatatcctgcggacgagaaacgccagggaaatcggtagactcctcagccattgtcaccgcaccggaaacctgctcaccaagaatacggttggtattacgcaagaattcaatcgcttcaagattctcgcgcccgccaaattcgttcgggatccactccccctctttacggctgtagtcgcgataaatcatactcgccaccgcatcgacgcgcagcgcatcaataccaaaacgttcaatccagtaaagcgcgttaccgacgaggaagttactgacttcacggcgaccatagttgtagatcagcgtgttccagtcctgatgatagccttcacgcggatcgctgtgttcatacaagttcgtgccatcaaattcggcaagcgcaaagtcatcagtcgggaagtggcctggcacccagtcgagaatcacgttcagaccagctgcgtgtgcggcatcaatgaaataacggaagtcgtcgcgagtaccaaaacggcgggttggcgcatacaggccggttggctgataaccccaactgccatcgaagggatgctcgttaatgggcagtagttcgaggtgggtaaagcccatccatttagcataaggcaccagttgatcggccagctcgcggtagctcaaccagaaattgttgtcggtgtggcgacgccaggaacccaggtgaacttcataaatagagattggcgcatcaaactgattcgcttttttgcgctcttcagtctgtacaaccttttccggcagcccgcaaataagagacgcggtttccgggcgcatttgcgcttcaaaggcataagggtcggacttcagacgcaagttgccattggcatcaatcatctcgtatttatagagctgaccgttatgcgccccagggataaacagttcccagatgccgctctctttacgcaggcgcatcgggtgacggcgaccgtcccagtagttgaattgcccaaccacgctgacccgacgggcgtttggagcccagacagagaaacgcgtacctgtgacgccatccatagtatctgcatgcgcgcctaaggtttcatacgggcgcaggtgagtaccttcagataatagccaggcatccatttcctggattagcggaccaaaacggtaaggatcatcaatcaggttttgctgaccatgccagacaacagccaactgatagcggaaaaaattcttacgtcgcggaatgacgccgctaaagaatccccgactgtcgagacactccagttttgcgagtttgcgcccggttttcggttcaatcacccacacatcggtagcgtcgggtaaaagggcacggacttccagtcccgcggtggttttatgcattcccagtacggaaaaaggatccgcaaaatggcctgcaattagcgcgttaatcacgtctctatcgatacgatcggacatgcttgtcttcctgttttattgtgtcaccccatccaattggatttttgacttctggttgtgacatttttttgacctgaacggcgcagcactctgtgcatcctctctgcgtcgtcctcacttcaggtaaggctgtgaatactcatgtattcagccacccttaaagaatagccaatgctctatttaactcccggtaaatcatgaaacatctgcgcttactcctgtattacgcactaacaggggcggcatcgcgccccagatttaatgaataaagattacgccagttgacgaagcatccgacgcagcggctccgcggccccccacagcagctggtcgcccacggtaaaggcactcaggaactctggtcccatattcagcttacgcaggcggcctaccggcgtggtcagcgtgccggtaacggcagctggggttagctcacgcatagtgatttcccgatcgttcggaacgactttcgcccacggattgtgcgcagccagcagttcttccacggtcggaatagacacatcttttttcaatttaatagtgaatgcctggctgtggcagcgcaatgccccgacacgcacacataaaccatctaccggaattacggaagatgtgttgaggatcttgttggtttccgcctgccctttccactcttcgcggctctgaccgttatcgagctgtttgtcgatccacggaatcaggctacccgccagcggcacgccaaagttatccaccggcagctcaccgctacgggttaaggttgtgactttgcgttcgatatcgagaatagcagaggacggggtcgcgagttcatctgccacatggccatacagatggcccatctgggttaataactcacgcatatgtcgcgcaccaccgccggaagcggcctggtaggttgcaacggacacccaatcaacaagatcattggcgaataaaccacccaagctcatcaacatcaggcttacggtacagttaccgccaacaaaagtcctgatgccattatttaatccgtcggtaatgacgtcctgattgacggggtcaagaatgatgatggcgtcatctttcatgcgcagagagcttgctgcgtcaatccagtaaccttgccatccgctttcacgaagctttggatagatttcgttggtataatcgccgccctgacaggtcacaatgatatcgagggcctttagcgcctccagatcaaaggcatcctgaagtgtgccagtggttccgccaaaagacggcgcagcctggccaagctgagaagtagaaaagaagacagggcgaatggcgtcgaagtcgcgctcttcaaccatgcgttgcatgagaacggagccgaccataccgcgccagccgataaaaccaacatttttcataagcgtttttttcctgcaaagatgtgtgctgtataaatgtgccggtctcctcttggcacatctttcaccatacaaaaagcagccaaagtcgcaagtgaaattaatcaatgatagcgaagccatcagtaatgcgacttatcctgctttgttagcacgcagaaagtccgcggcaattatcagggaatttgagttatgaatgaaatcatttctgcagcagttttattgatcctgattatggatccgctcggaaacctacctattttcatgtccgtactgaaacatactgaaccgaaaagacggcgggcaatcatggtgcgagagttgcttattgctctcctggtgatgctggtgttcctgtttgcgggtgagaaaattctggcatttcttagcctacgagcagaaaccgtctccatttctggcggcatcattctgtttctgatcgccattaaaatgattttccccagcgctagtggaaatagcagcgggcttccggcaggtgaagagccatttatcgtgccgttggcaattccgttagtcgccgggccgactattctcgccacgctgatgttgttgtctcatcagtacccgaatcagatggggcatctggtgattgctctgctgctggcctggggcggcacctttgtcatcctgctacagtctagcctatttttacgtctgctgggcgagaaaggggtgaacgcacttgaacgcctgatgggattgattctggtgatgatggcaacccagatgttcctcgacggcattcgaatgtggatgaaggggtaacgaggagagtttttcgaaaagaacccggtagcgtcacaactaccgggcgaacaaacttaactcaacagctggaacgcaatcatcccaacgatggcaccgacagtgccgaggatggtttccatcatggtccaggttttcagcgtttcggcttcggtcgcgccggtaaatttaccgaacaaccagaaaccggcgtcgttaacgtggctgacaacaatgctaccaccagcgatacaaatgctcagcgccgccatttgcgcaccggagtagttcagttgttcaataaccggcatcaccagtcctaccgccgttaaacaggctacggtggcagaaccctgaatgatgcgcactgcagctgccagcacgaagcaggtgatagcaatcggcaggcccatgccggttaacgcttcgcccagtgccggacctacgccagagtcaaccagcacctgtttgaacacgccgcccgcaccaatcaccagcagaatgatccccgccggttgcagcgcgtgaccgcaaatctccatcactttgtcttttggcatgccctgacgcattgccagaccgtaaatcgccaccagacaagcaaccagaatcgcggtaaacggatgaccgataaactcaaaccattcgtaagcagtacttccttccggcacaaaacgcgcggcaatggttttcagccctaccagcaccagcggcagcaggatcaggctcaggctgaatccgaaagatggcattttgccttcgccgagatgcggttcgctgatgtcgtcaggaatatgcagctcaacgtaacggctgatgaagttaccccacagcggcccggcaataatcattcccggaattgccgcacacaggccaatcaggatcatccagccaaagtcggcattcatctggcttgccagcagcatcggcgctggtccaggcaccagaaatgccgccgctgccgccacgcctgcaaataatgggattaccagcttcaccaggttcgtaccggtgtggcgcgccatactgaaagcaacgctaatcagcagaactatcgccacttcaaagaacagcggtagcgcacagaccagccccgcaaggccgatggcataatgcgcgcggctgtgaccgaaggatttgagcattttgacggcaatctgatcgactgcgccggtttcatgtaagatcttgccaaacatagctcccagggcgacaaccaccgccaggaagccgagggtgcctcccatccctttttccatcgtcgctgcgattttatcgagcggcataccagaaaaaaggccagcccccatggacaccaccattaaagccaggaaagcgtgcatacgcgccttcatgactaaaaacagcagcagtaaaacagaccctactgctgttaaaacaagcgttaatgtagtcactacttatttgccttttttaataacctcaatggtgcttgccacaacaccttccagcggttgatcgatatccaccaccagtacatcggtttcgtccgcacccggctcctgcagcgtttcaaactgcgtcaccaacatttgggttttaaagaaatggcctttgcgcgctttcaggcggatttcaatcacatcaaaatcgcctttcaaatagatgaaagagagattcggattaccttcacgcagcaagtcgcgatagtgttttttcaatgcagaacagacgatcaggctcactttattagtgcgctgcatagcaaacgcggcgtcgttcagcgcctgcaaccacggtttgcgatcgtcgtcattcagtggttcgccagacgccattttttcgatattgcgccgtggatggaggaaatcgccatcaagaaacgcggcatgaagttgatgcgccacttcactggcgaccgcagatttgccgctgccgcttacgcccatcaagacgtaaatgtggtgatcatggttagtcgtgctcaaagtggtgcccccacaatacaagaattaaaaatgttacgggtaactgttatcggtaacattgtccagccggacaatatcagaagcaatatccatccatgccttaagtgtataagtgtgagctacttcaaatttgtgggcttaaatagatccgcccggactcaaggtgaaacctaaatctaacattttcggtgtcacagattcgccacgaatacgcgccagcaggcgttcagcgccaatactgcccatccgctcacgcggcgtcagcacgctcgcaagtcgtggctccatcacctgaccaatgtcatgaccgtggaaaccggcaatcgccatatcgtcaggaacttttaaccccagacgctgacattcaaacgccgcgccgaccgccaggtcatcattcgtacagaacacgccatccagctgcggatattcccgccgcgcctggcgaatcagttcaataccggaagagtaagaagaagattgctcaaccatcacgctatatggcaccaggcctgcatccagcatcgcctgttcgtatcccttctgtttgatgatagtacgttcgtcgagacgtgcgccgagataggcaatgtggcgatgcccgcgagcaataatggcagtggtcatctggcgtgctgcttcaaagttatcaaaaccgacggcgatatcaaggcatgggctcttgctgtccatcagttccaccacgggaatacccgccacttcaatcatctttaaggtgcgcggcgtgtgggtacgttcggtgaggatcaggccgtcgatattccaggagagcatggattcgaggcgttcttgctccatttccggtttataaccgtagtgcgccagcatggtctgataaccgtgcgcgtcggtgacgctttcgattccgcgtaatacttccgcgaaaacctggttggtgagagaaggtaacaggacgccaatcgcccggctggtggcgttagagaggatatcgggcgcacgattgggaatatagcccagttcatcaagagccgcggcaatcttgccgcgtagagcgacggaaacctgctccgggttgcgtaaaaaacggctgaccgtcattttggtcacgcctacacggtcagccacatcctgaagtacgggtcttttctttttcatcgtcctgaaggtacaaaagagatagattctcttagtttaacacggacacatcagaaccttcccggggaaaacagtgcttgtttacaattattagatatacactaaatcaattgcatcgcattgtgctaacgacgcggcaaaaccccggaagcgtacatcagcacgcgaccggagcgagcgaggaagcctgcaaaaaggcaggcttcaaagatgccgttgagttttaaaccggcggcagatcgaacagtaacacttcgctgtcgctatccgcatggatggagattgcctgctcatcccagattgccagaccatcgctggtgctggctttcacgccgttaatggtgacattgcctttcaccacctggatccagacgcggcgttcagcggcaatctgatgcacgctctgctcatctttcagcaacgcccagcggtacagttccatatcctgatgcactttcaaactaccatctcgcgcatccgggctgagcaccagctgtttgccctgtacggcatcgaagcgacgctgttcataacgcggcgtaataccgttttcttcaggcatgatccagatctgatacagatgcagacgctcggtgctgcttgggttgtactcactgtgacgaatacccgtaccagcactcataatctggaactcacccgccggaacctgctctttattgcccatgctgtcctgatgctcaacagtaccttccagcacgtaggtcaaaatttccatatctttatgcgggtgagtgccgaagccctgccctgcttcaatcacgtcgtcgttaatcacgcgcagcgcggagaagcccataaagttcggatcgtaatagttggcaaaagagaaagtatgccaggagtccagccagccatgatttgcatgaccacgttcatttgctttgcgtaagtagatcatttgtattcgccccctgaatgatttcgatgggcttagtgtggacccgatctgcctgggatgatagagggtgaaaattgacccctctgttcaaaaaaattgaactattcgaggggccatcaaacttacttagcgagagttactgtggagggagaggcttgctcaaatccgcgttcaaggatttccagattggtaagaacttcagattccttgacgtaatttggcgcaccgtgggtgatggtttgatacaacgcatcataaacgcgcccgtaatcgcccatctccggcttcatctcttctctgaccgtcacgccctcgtcattgacatactccagcacaccgacgctatcatccgctgcgaatcccggttcgcccggcataatattagccttcaggctggtttcctgctggtcgataccgtatttaataaagctacctttcttaccgtgaacgataaatttcggataatcgattttcaccagatggctggttttgacgatggctttcaggtcgccataaaacagttgcgcttcaaaggtgtcgtcaggattggctttattacgcaggctgcggatgtcataagcgacgtgatccgggcgaccgaacagagaaataatctggtccatcgtatgcacaccaaggccataaaacgcgccatcctgcggcagcccaggtttggtttctgccaccgggcggtaatagtcaaaatggctttccacttcaacaatctctcccaacttgccactttcaatcgcttttttcgctgtcaggaagcaggagtcaaagcgacgattctgatacggcgtgacggtcagccctttgcttttcgccaacgcaaacagctctttcgcctgcgcaagtgtcggagtgaacggtttttcgaccagcacatttttcccggcttccagcgcgcgtttcgcgtactcgaaatggctgtccgcgtgggtgcagacaacaaccagcttaacatcgggatcgtttagtacttcgtcgagatcgctggtgaaatggatatgggaataaatgggagcctgttcttccggcttcgcatggcgacgaaaaatatgcgcgacatgccagctatccttgcggttaagtacatacggcagatggtaacgggtggtgcttttgccgaagccaataaaggcgcagttgatgaccatgatttcgtcctttttaaggtggttatttacaccttagcgcaaagcggacgtggttcctactggagtgcgcataacgaacacaagcactcccgtggataaattgagaacgaaagatcaaaaaaaaagccagcacccggctggctaagtaatactggaagcaatgtgagcaatgtcgtgctttcaggttctccgcgagggtcttcctgatcgcgagacaataataatcattctcattcgcacttgtccaacactttttgcaaaaaaatgcatttgactcgcatttgaaagtcaatgatgttgaaagggacatttaccccaaagaggacaaaggaacaaatgctcttcccacgaagagggccgctaaccttagtaccccgccgttaaatcatccacgctgcgcgggtcggatgcgccgtacaactcaccgtccggcccaaccataatgctttgtgtactgcccatcgcctctttcagcgccactttctgaccttttgcttccagcagcttgagcgtatccgggctaaaccctttttcgacacgcagctcgtccggcaaccactgatggtggaaacgcggcgcattggtcgcttcggcgacgttcaagccataatcgatgctattcaccaccatttgcagcactgtagtgatgatccggctaccgcctgggctaccggtaaccagccaggttttaccgtctttcaccacaatggtcgggctcatgctgctcagcgggcgtttgttcggcccgacggcgttggcatcaccgcccaccagcccgtaaacgttcggtacgcccggtttggcggagaaatcatccatctggttattaagcagaataccgctctcgcccgcgacaatgcccgtaccgaaggtggtgttcagcgtataggtcaccgccaccgcgttaccatctttatccaccacactgtaatgggtagtttgattactctcataaggcgcaagcttgccggggcgaatttcgctggatggcttcgctttattgatatcaatttgatcggcaatagatttggcataggctttattggtcagcgcctgccacggtactttgacaaaatccgggtcgccaagatattcgctgcggtcggcgtaggcgtatttctccgcttctgccatgatttgcatcgcatcggcgctgccaaagccgtatttcttcatatcgaagttttccagaatattgaggatttgtacgatatggatcccgccggaggatggcggtggcatggagtaaacctgatacccgcgataatcgccgcttatcggagtgcgttcgaccgctttataggctgctaaatcttctttagtgatcaagccaccgtttttctgcatctcctgggcgatctgttccgcaatcgtgcctttatagaattcgtccgggccgttttcagcaatcatctccaggctctttgccaggttcgcctgcaccagcgtgtcgccctttttcagcggctcgccctctttccagaagatagctttactgttttcgtgattcggcaacacttcgctaccgtaggttttgagatcgtcagccagcgcgtcgttaacgataaaaccatcgcgtgccagtttaaacgcgggctgcacgactttgttcagcggcatggtgccgtatttatccagcgccaggctgaaacctgctaccgtacccggtgtgccggaagccagatggctagtgagactttttttgctgtccgggttgccctgatcatcgaggaacatatcgcgggtcgctttggcgggtgccatttcgcggaaatcgatagccgtggtattgccatttttgctgcggattaacataaaaccaccaccgcccagattccctgcctgcggatgcgttaccgccagcgcgtagcccaccgccacggcggcatcaacggcattcccgccctccttgagaatatccacccccacctgagtggcagtggcgtccacagacgctaccattccctgtttcgcgcgtaccgggtggaagacatcttcctccacaccatagctgacgggcggcgcaggaggcgcggcggcggcgctaaaacaacttccactgagcagagcagcaatggccacccggcgtaaaaacgtcggttttatcatcgttattctccagagattaaggggcaaccccagctaagcctggtatataactctgaattaatcatcgttttgtcgggaagcgagtaaacttaaaggatatcttcagaggaggatacgcgatgaaacgacttctgattcttacggcactcctgccgtttgtcggctttgcacagcccattaatactctgaacaaccctaaccagccggggtatcagatacccagccagcagcggatgcaaacccagatgcagactcagcaaatccagcaaaaagggatgctgaatcagcaactgaaaacgcaaactcagttgcaacagcagcatttagaaaaccagataaacaataattctcagcgggtgttgcagagtcagccgggggagcgaaatcccgcccggcagcaaatgctgcccaacaccaacggcgggatgttaaacagcaaccgtaatccggatagtagcttgaatcagcagcatatgctgccggagaggagaaacggcgacatgctgaatcagcccagcacgccgcagcctgacattccgttgaaaactattgggccgtaattattgggccgtaaagttcggaccaatcacgtcaatcgcatcggtacagatgcaatccacaccccagcgcagcaactctgctgcgcgctggggtttattgacggtataaaccagaatccgcagtccggcgtctttcaactgcatcactcgcgctttattgagtaacttatgattgagatgaatagagacgcagcccagccgcgcggtcagttcgcgccagtcgtcgcgccactcatccagcaacaaaccgcgcggcagttccggtgccgcctgttgtgcagcttctaaagcatcaatctcaaagctactcagcagcggcggcgtcataccggcccacagctcgcgtgccgccagcgccaccattttgcccgttaatggcccggtgccggtggtgggtttgatttcgatattcgccatcatcccgtgttcgcggcaacgttccgccacctggctaagcaacggtagcggctcacctttaaacattttgctgtaccaactgcccgcatccacgcgcagtaaatcctgccagttcagttcacccgcgacgccccagccgttgctggtacgttcgagattgtcgtcatggagcaggaagatctcgccatctttgcttaacttcgcgtcaaattcgatcatcttatgaccgtattttgccccgacgtcgatactcgccagggtgttttccggggccagcttaccgccgccacgatgagcgacgatgcggggataaggccagttactcatactcgttgtcctgtttcaccatcaaaaagatgcagctgattttccgccagatgcagccacagcgtgctgcctgccgtcgggcgctcctgatgcgccagtcgcaccaccagcttctgctcgccccagcgtccgtgcgccaggttatctgcgccgaggatctccagcgtgtccatcaccatcggtacgccgccttctgcctggctgcttagcgcaatatgttccgggcgaatgccgagagtcattttacgcccggcatactgacggtagccaccgtttagcggcagctcaataccgccgtccagttcgaaatgcgtgccttcgttattcacgcggcctgtcagcaggttcatcgccggactgccgataaaactcgctacaaacaggctggcgggcttttcgtagacttcaactggtgtgccaatctgttcggcaacaccgccgttcatcaccattactcgctgggcgagcgtcatcgcttcaacctgatcgtgagtaacgtagagactagtcgttttcaggcgacggtgcaactgttgcagttcaagacgcatctgcacgcgcagcttggcatcgaggttagagagcggctcatcaaacaggaacaccgccggatcgcgcacaatcgcgcggcccatcgccacacgctggcgctgaccgccggaaagctcgcgcgggcgacgtttgagcagaccgtccagctccagaatgcgcgccgcttctttaacgcgctcggcaatttgctgcttgcccatgccgcgaattttcagcccccacgccatgttttcttcgacactcatatgcggataaagcgcgtagttctggaacaccatcgcaatcccgcgatcttttggctccatttcagtcacgcgctggtcgttgatccagatatcgccttctgtcacccgctccagcccggcaaccatgcgcagcagcgtgcttttcccgcagccagacggcccgaccatcacgataaattcgccatccgccacatcaagggtcagcggtttaatgacctgggttttaccatcccagcttttggttactgcctgtaatttcagtcctgccatcttatttctcactatcgaccaggccgcgcacgaaggcacgctgcatcactaaaacaatcaccaccggagggataagcgttaacaacatcgccaccatcacactgttccattccgtggtgccttcgcctgtagcgatcatccctttgatccctgccacggtggtgccgagatccacatcggtaataatcaacaacggccacaaatactgattccagccgtagataaaggtgatcacaaacagcgccgccagattagttttggagagcggaaaaacgatgtcgcaaaagaagcgcattgggcttgcgccgtcgatccgcgcggcttccaccagctcatccggcagcgtcataaagaactggcggaacaggaaagtagcggtcgcgctggccatcagcggcagcgttaaaccggcgtagctgtcgagcatctgcaggttggcgatgacttccaccgtcgggaagatacgtacttcaaccggcagcatcagggtgataaaaatcatccagaagaagaggttacgtagcggaaaacgaaaccagacaatggcaaatgcgctgagcatgctgacggtaattttgccgagcgtaatgctgaacgccatcacaaagctgttaagcaacatccgccagaacggcgcgctattcgtgcctaccccgttcacccagatgttgtggatgttttccagcagatgtgtgccggggatgagcgtcatcggcgcggcatagacggcctgtttatccagcgtcgccgcgacaaacgccacgtacagcgggaagaggatcaccgcgatcccgaggatcagcatggtatggctgaatatcgtcagccacggacggttctcaatcattggtaacgcaccttgctttcaacatagcggaactgcaccaccgtcagcacgatgacgaggaacatcaacaccacgctctgtgcggcagagctagccagatccagtccggtaaaaccttcgcggtagatcttataaatcagcgtcgtggtggcctgaaccggcccgccggacgtggcggcgtcgatcaccgggaaggtgtcgaagaaggcatacaccaggttcactaccagcaggaagaaactcaccggggcgataagcggcagcgcaatcttaaagaagcggcgaatcggccctgcaccgtcgatggctgcggcttcgatcaagctacggggaatggattgcagcgcggcatagaagaacaggaagttgtagctgatttgcttccatacactggcaaacaccaccagaaacattgcctgaccgctgttttgcgcgtggttccagtcgtagccgaactccgcgagaaaatgggtgatcagcccgcgaccggggttaaacaggaagatccacaatacggcggcaacggcgggagccacggcgtaaggcagcaacattaaggtttgatagaaacggctgccgcgcacgatgtactccaccagcgccgcaaagaacaggcttaccagcaaaccgctgacggtgacaaaggtgctgaattttatcgtcgtccagaaggagtcgagatagtagctgtcatggaacagcgtgacgaagttatccaggccgacaaactggctggagaaaccaaacggatcgacgctttgtaggctgtaccacaacgcttcgcccgcaggccagataaaaaagataacggtgatgatgagctgcggcgcgaccagcagataaggcagccagcggctgcggaacaccggacgggaactactcattacggttgattcctgaactgtgccggatgcgcttcgcttatccggcctacacgcgatgccaggtcagataagcgaaacgcatccgacattacactgattaagacttcgtgcttttctcaaagcggcgcagcaactgatttccacgctcaacggcggtatccagtgcctgctgtggtgtcttcttaccggtccacacgctctccagctcttcatccacaatcacgcggatctgcggcatgttgcccagacgcagccctttggtgaacggcaacggcggcttattcagcatctgacgcgtcgcggtatccgcccctgggtttttctcataaaagccctgctcacgggtcaggtcatacgctgctttggtgattggcagataaccggttttctgatgccactcggcagcgttttctggcttcgcgaggaaatcgaggaacttcgccacaccggtatacgtttctttatctttaccctgcatcacccacaggctggctccgccgataatggcgttttgtggcgcatctttcgcatcggcgtcgtaaggcatcatgcctacgccgtagttaaatttggcgtactcgcgaatgttggcaagagaaccggaagaggcggtggtcatcgcgcaatcaccgttatagaacttctcggtggattcatccttacgaccgacgtagctgaagtcgcccttcttgttcatctcctcgagcatggcgatgtgtttcacctgctccggcttattgaactccagcaccgcgtccgtgccgtcaaagccgttgtttttgctggcaaacggcagaccgttccaggcgctaaagttttccagttggatccagccctgccagccgctggcgtagccgcacttcatgccggaggctttcagtttcgcggcatagtccgccagatcctgccaggttttcggcggctgttccgggtctaatcctgctttcttgaaggcgtctttgttgtaatagagaacgggggtgctgctgttgaatggctgggagagtaagtggcccgttttgctgtcggagtagtaaccactaaccgtcggcacaaactggctctcatcgaactgaatccctgcctctttaaacacgtcatacaccggtttaatggctttgctcgccatcatggtggcggtgccaacttcataaacctgcaaaatagccggcgcgttgccggtacgaaatgcggcaatccccgcgcttaaattctgttcgtagttgcctttataggtcggtacaattttgtaatccgggttttcggcgttaaaacgttgggccagagaatccacctctttacccagttccccttccatagaatgccagaacggaatggtcgtcactgcctgtgcattccccattaacgccagtccgagcgccagtgcactagctgtataatgtaacggtttcatcgtttatctctcttgttgtaccgaatgcgcgaattcacgcgttttatgctcgcggggtaacatgacatgctcgaattacagaaaaataacttttttgttacatttgtaagatagtaaggtgtcagaaagatgacaaggcggtgacggcgtgggtgagggaaaatgggagatggggcacggataagcgggaaaatatagaaggtctgaatcaaactctacagattgctcatcgtttcatgccggatgcggcgtaaacgccttatcaggcctacaagatcgtgcaaattcaacatattgccactcacccagtaggcctgataagcgcagcgcatcaggcaattttacatttgtcacctgtctcaaaggagtcttttgactccctatcaatcaacgtgttattacccgcctaaatacgcacttctcaccgcttcattcgccagcagcgcatcaccagtatcggaaagcactacatggccgttttccagcacgtagccgcgatccgccagctttagcgcctggttggcgttctgctcgacgagaaagatagtcatcccctgctcgcgcagctgctcgatggtgtcgaaaatttgctggatgataatcggcgcaagaccgaggcttggctcatcaagcagtagcaaacgcgggttgctcatcagcgcacgaccaatcgccagcatctgctgttcaccgccggacatggtgcccgcccgctgaatacggcgctcatgcagacgtggaaacagctcatacacccactttatgcgctcctggaactggtcgcgttcagcaaaaaaaccgcccatcgccaggttctcttccaccgtcatccggctgaagacgcgacgcccttccgggacaatcgccaccgcttcgcgcatgattttcgctgtctgccagtcggtaatgtctttatcatcaaacacaattcgcccgctggtggcacgcggatcgccgcataacgtgccgagcaaggtggttttccccgccccgttcgcgccaatcagcgtgacaatctcgccctgattgatatgcaggctcacctcatgcagcgcctggattttgccgtagtgggcgctgactttgtcaaaggacaacatgactttttccatcttatgcctcacctaaataggcacggatcacgtccgggttattacggatctgctccggcgtaccgtttgccagcggcgtcccctgattgaccacgtaaattcggtcgctaattcccatcaccagcttcatatcgtgttcaatcaacaagatagtggtgttgtgatgattgcgcagttcggcaatcagctcatccagctctttcgtctctttcgggttaagacctgccgcaggttcgtcgagcattaaaatctccggctgcgtcaccatgcagcgggcaatctcaagacggcgctggtcaccataggccaggttactcgcctgacggttggcgtgttccagcaaaccaatgcgctcaagccaggtcgcggcgcggtcgagcgcttcgctctgggcgcgacggaaggatggcgttttcaacaggccagagaacagcccggttttcagttgctgatgctgcgccaccagcaggttttcaattaccgtcatttcacggaacagacgcacatgctggaaggtgcgcaccacgcccatgcgggcaatttgctgccccggtaaaccttccaggtgctgatcgcgcagtaaaatggtgccgccggtgggtttgtagaatccggtcagacagttaaaaaccgtggtttttccggcaccgttagggccgattaagctgacgatctcctgcgggtacagttcaagattgacgttgttcaccgccagcaggccgccgaagcgcatcatcaggccgttaacagataataatggctgactcatgcctgctctcctttcgctgcgccgtttttcagcttcagttgcgggcgcgtcatgggcagcaagccctgcggacgccagatcatcatcagcaccatcaaaccaccgagcattaacatgctgtattcgttgaaatcacgcatcaactcgcggctcaccaccagcaaaattgccgccagaatcaccgcaaattggctgcccataccgccgagcaccactatcgccagcacaaacgcgctttcggcaaaggtgaaggattccgggctgacaaagccctgacgcgccgcaaacagcgttccggcaaaaccggcaaacgcggcacttatggtaaaggcagtcagcttgatacgacgcgggcttaagcccaggctacggcaggcgatttcatcttcacgcaacgcttcccacgcacgccccagcggcatccgcagcaggcggttaatgacaaacaggcttagcaccaccagcagcaacgccaccaggtagaggaagatgacacgatcggagggatcgtatttcaggccaaagaaattactgaacgtgtcccagccgccttcacgagcggtacggctgaactcgagtccgaagagtgtcggtttcgggatctgactgattccgttcgggccgccggtaatttcggtgttattgagcagcaatatgcgcacaatttcgccgaaaccgagggtaacgatcgccagatagtcaccgcgcaaacgcagcaccggaaaaccgagcaggaagcccgccgccgctgccattaatccagcaatcggcaggcaggtccagaagcccaagccgtaatagtgattgagcagcgcaaaagtgtaagcgccgatggcgtaaaaaccgccgtaccccagcaccagcagaccagaaagaccaacaaccacgttcagcccgagaccgaggataatgtagatcatggtcagggtggcaatatccaccgtcccgcgactaaccataaacggccacgccaccgcaagcaccaacagcgccacgaggaacagtttctgcttcaccgtggagccatcaatggcgggcagaataaacttcggtccggaaacgcttttcaaccctttctggaaagccggtcgcaaaagctggaagaaaaagaccaccgccgtgccgataaacacccactgccaacggacatcgctagccgtgtcgaccaccagtttggtgccatccagctccagttgcacgcccataaagacgcccgccagcacaaagaacatcgcggcagagagcagcgccattgcaatatgcatcggtttcatactttctctacctccgggcgacccagaataccggtcggcatcaccagcagcaccagaatcagcagggcgaaactgaccacatctttatattccgtactcagataggcagaagagagcgcctccgcaatccccagaatcaggccgccaatcatcgctcccggaatgctgccaatcccaccgagcaccgccgcggtaaaggctttcatcccggccataaagccgatgtaggggttaatgacgccgtagaactgaccgagcagcacacccgccaccgccgccatcgccgcgccaatcacaaaggtcagcgcaatcacccggtcggtgttaatgccaagcagactcgccattttcagatcttccgcgcaggcacgacacgcgcgacccatgcgggaatagcgaatgaaaatcgtcagcgccagcatggcgaggaaggtaacaatccagatcaccgcctgcatggtggtaatagaggcagagaagttttcgctatgccccaccacccactgaccgttaaacaggctcggcagcgccacgtcgcggctaccttcggtcaggctgacgtagttttgcaggaagatggacataccgattgcagagatgagtgcaatcaggcgcttagagttacgcaccgggcggtaagccacccgttcgatactccagccgtaggcgctggcaatgacgattgcgccgacgaatcccgcagctaccagcagccagccggtatcaatgcccatcatcatcagcgcggcgatgatcataaaactgacgtagctgccaatcatataaacctcgccgtgggcgaagttgatcatgccgataatgccgtaaaccatggtgtagccgatggctatcagcgcgtaggtactgcccagcgtgacgccgttaaacatctgctgcaagaaatacaaaaactgctcagacataaggtaacctttctaaacccgcccgcattttacgggcggtgggatgatcacttggctgccgtggaactaccgtcggcgtgccactggaagacaccaaaatcaaatcccttaagatcgcctttttcatcccagttcagcggcccaatcacggtgtttgcaccgttagcttttaaatctttcaccagcgccagcggctcatcgctgccggtacgctcaagggcagtcgccagagattgcaccgccgcgtaggtgatccagacataaggcccggacggatctttcttgtctgctttcagcgcatcaacgatgccctggtttgccggatcctggtcatagcgttttggcatagtgaccaacatgccttcggcggcatcaccggcaatgttgctcaagctcgcattacccacaccttccggccccataaactgggttttcaggccaacggaacgggcctggcgcagcatctgccccatttccgggtagtaaccgccgtagtaaacgaagtcgatgttttcttttttcaggcgggcgatcagcgcggagaaatctttctccccggcggtaataccgtcgaagaagacgacgttggcgttagccgctttcagcccgtcctgcacgctacgcgccagcccttcgccatactgttgtttgtcgtgaatgatggcgatgcgctggggcttcaccgtctcaagaatgtattttgccgccgttggcccctgggaagagtccagcccggcagtacgcataatgtgttgataaccgcgttgggtcagctccgggttggtcgctcccgggctgatcatcagaataccttcgtcttcatagatatcactcgcaggctgggtagaagaagaacacagatgaccaataacgtatttaatgccgtcattaacgattttgttggcgaccgcaacggcttgtttcgggtcgcatgcgtcgtcatattccacgccaaccagtttatcgcccttaattccccctttggcattaatgtctttaattgcctgacgcgcgccgttaaattccatatcgccccactgggcaatcgggccggacatcgcgccgacaacggcgactttaatatcgtcagccatagcggtgtgactaattgccagtgcaatcatccctgcgatgatagttttcgcattccgtttcatagtcaaaaatccccattcgtgatgttgtgttgctttgtttttatgtgttaacaaatcagactgttctttttttatactgcactgtttttgcctgtctgattaaggggttagcgcagtattttgtgataatagcgattaaaatccctatttttcagtcgattaagaacagataatattctgaatttattgatagataaacagaaaaaagtgcctttgtcagcataaaataacggcacaaagggcggaataattcactatcattcaggggattatgctggacatttttcattctctaatgttttaattttgtaattattgctgttaaaaaattaatcacctgccaaaagaaataaaaaagagaaagcctccgattaaattatttcgctacactggttccacttttgtgatttacacgggttacccatgaagctgaccatcattcgattagaaaaatttagcgaccaagaccggattgacctgcaaaagatctggccggagtattccccttccagcttacaggttgacgataaccaccgtatctacgccgcgcgttttaacgagcgcctgctcgctgccgtgcgggtaaccttaagcggcaccgagggagcactggattccctgcgcgtgcgggaagtcacccgccgtcgcggtgtggggcaatatctgctggaagaggttttgcgtaacaatcctggcgttagttgctggtggatggcggatgcaggcgtggaagatcgcggtgtgatgacggcgtttatgcaggcgctggggtttacggcacaacagggcggctgggagaagtgttaatcgtcaagtttgatttcaaaagtgatattgcctgatgcgctacgcttatcaggcctacaatgtgtgttgcaatttactgatttctttggatcttgtaggccggataaggcgtttacgccgcatccggcatgaagcaacgtactcgatattagcaatttggcggcaacccaaagttgccgattaatgattacttcgcatcggtcgccgtgccgttggcgtgccagtcaaatacgccgaactcaaagcctttcagatcgcctttctcatcccaggtcagcggtcccattacggtatccacggagttcgctttcaggtatttggcgatttcagccggatcgtcagactgattcaggcccgcctgcaaagattgcagcgcggcgtaggtggtccaaacgaatgcgccacttgggtcctgttttttcgctttgatcgcgtcaacaatgggtttgttcgccggaacctgatcgtagttcttcggcttggtcaccagcagcccttccgcactttcgcccgcaatgttagacaggctaacgttagccacaccttccggccccataaactgagttttcagccctgccgcgcgtgcctgacgcaggatttgccccatttccgggtgataaccgccgtagtaaacgaagtcgatattctcttttttcagacgcgccaccagcgtactgaaatctttttccccggcggtgatgccatcaaagaacaccacgtttgcattgcctttcttcaggccgtcctgcaccgctcgcgccagaccttcgccgtattgctgtttgtcgtgaacgatagcaatacgctgcggtttcactttctcaagaatatatttcgccgccgtcggcccctggtcggagtccaggccggtggtgcgcaggatcagctgatagccacgggcggtcagctccggcgcggttgccgctggggtgatcattaaaatgccttcgtcttcgtagatgtcagacgcaggctgcgtactactagaacagaggtgaccaatcacatatttaatgccgtcgttaacgactttgttcgccaccgcaaccgcctgtttcgggtcacaggcatcgtcatattttacgatttgcagtttgttgcctttaatgccgcctttagcgttgatatccgcaaccgcctgctctgcgccggtaaactcctggtcaccgtactgcgcaaccggaccggacattgcgcccacgaccgcgactttaatatcttctgccagagccatattgctgaatgccagcgcgatacatcctgccagtaacgctttaccctttatgttcatcctgagaatccccattcttctggttattacgtgtgttgtgatgttgtttttcagcactttatttcgttttatgcatgactacccgtgctttagcagcatactctgctaaaacatacccgatttttatgatattggaatagctattttgacagtttattaacaatctgcgtggggattggcgttttgccggaggggaaattgattattacagaggcccaaaaaacaaaaaccccggactctcatccagggttctctgcttaatagcggaaattacgcttcaatggcagcacgcaattttttcatcgcgttcttttccagctggcgtacacgctcagcggaaacgccgtaacggtcagccagttcctgcaacgtggacttgttgtcttcgtccagccagcgcgcacggatgatgtcctggctgcgttcgtccagaccctgcatcgcgtcggtcagacggtttgccgcctgctcttcccagttatcatcttcaatgccgtcggcaaagttagaacttttatcctgcagatagagcaccggagccatcggctggctgtcggaatcgtcgtcggaagacaggtcaaaggtcatgtcctgtgccgccatacgactttccatctcacgtacgtctttgctggttacgcccagttcacgggccaccatttcgacttcatcctggttaaaccagcccagacgctgcttggttttacgcaggttgaagaacagtttgcgctgcgctttggtggtcgcaactttgacgatacgccagttacgcagaacgtattcgtggatctctgctttgatccagtgaacggcgaaggagaccaggcgcacacccacttccgggttgaaacggcgcactgctttcatcaggccgatgttaccttcctgaatcaaatccgcctgtggcaggccatagcccgcataattacgagcaatatgaacaacaaaccgcaggtgagacaggatcagcgttttagctgcttccagatcgccatggtaatgcagcttttcagccagcgcccgctcctcgtcagcgctcaacatcggccacgcgttagctgcccggatgtaggaatccaggttgccaactggggctaaagctaaactttgcattttgtcagtcattcaaatcctctcaatcgatatcttctggcgcttcagtggtagcaacaactgtgccagagcttaagagcaacgaggttatcattcactgttttatcagaccgtgattttatccacaagttcaatgcaagcttgtgaataaattacgcacaaaatgtgacatagagatgaaataccgggaagagacaacggggtctctttccctgctacggaacccattgcagggaaagagtataacacgcttttattattcaggcgtaaagtggcgtaaatgttgtaccgtggcaagccacgctgccacccagccaatcatgctgcataccagcagcaatagcaggcattcatcgaaacttaagccattgatatcaaacttcgttccgaaaacctgtgccacttccgcaaccgcgctactcaatcgcagcaccagaatttcactcaaaattaaactcaacaatgcgccagaaaatcccagcagtgcgccaccatacaggaacgggcgcaggatgaatccatctgtcgcaccaatcagtttctgtacgttaatggagtcacggcgagcaaagatactcagacgcacactgttaccgatgacgaggaacacggccgccaccatcaacacgccgatcatcgcgctaacgcgcccgaccagcccggtcaacgccgccagacgggcaaaccagctgtcatccatccgcacttcgtcaatgccgttaatctgcgtgatacgatcacgcagcgtattcagactttccgtcccctggaaatcgagtttcgggatcaccaccgccactgccggaagcgggttttcttccagcatatccagcgcaccaccaaaaccagaccagttacggaactcacccagtgcgtcttcacgagaaagatagttcactttctccacgccttgctcggcctgcaactgtgccaccacgcccgcagcagcgtcatcgtccagcgttttttgcagataaacagtgatttgcggactcggataatactgcgtcgccgcctggttaacgtttttgtacaccatataacagacgctgggcagcgtcagagaaatggcgataaccatcaccgttaaaaacgtggcgaacggtttgcttttcagatcctgcaatgcgccgtggaaggcatagcgcacctgttcgttgaaaacgttggttttgcgatttaccggttttgggctggatttcgcgcgttttggtgcgttacgaccgccgtcgccactgccgccgacgcttttacggaagcgatcaagacgcccgccaaactgccgaatatgattgattgcatcgcgcttattcatggcccacgcctccatgcaagtgaccatcgctcagggtgagcatgcgataggaacgccggctgatcaggttgatgtcgtgcgttgccatcaatacggttaccccaacgcggttaaactcttcaaacagacgtaaaatgccttcgctcagcgcgtcgtccaggttaccagtcggttcgtccgccagcagtaccgcgggcttgttcaccaccgcgcgggcaatgccaacacgctgttgttcaccgccgctaagctgaatagggaagttcttcgctttgtccagtagcccgactttatccagcgccgcgctcacccggcgacgaatatcgtcaccgctggcaccggcgataatcagcgggatcgccacgttatcgtagacagtacggtccatcagtagatggtgatcctggaaaatcatgccaatctggcggcgcagaaacggaacttcacggtttttcagacgcgtgatgtcatggccgctaaaccagattttcccggcgctgggccgctcaatcccacagatcagcttcaggagggtacttttccctgcgccggaatgaccggtcagaaacgccatctcacccggctgcatatggaacgtaacgccctgcagcgcctgtctcccaccgagataagccttgctgacatgttcaaagcgaatcattgttaatcctctcgggcaaaaagtgcctctataaagtcgtccgccttaaacggacgcaaatcctcaatacgttcgccgacaccaatgtagcggatagggataccaaactggtcagccacgctgaaaattaccccgcctttcgccgtgccgtccagtttcgttagcgtgatgccggttaagccaacggcttcatggaacagtttggcctggcttaccgcgttctgcccggtgctggcatcaatagtcagcataacttcatgcggcgcttcaacgtcgagtttcttcatcacgcggacgattttcttcaactcttccatcaggtggcttttgttctgcaggcgtccggctgtatcggcaatcaggacgtcgatattacgcgctttagctgcctgaatggcgtcgaagataacagaggcggaatccgccccggtatgctgggcaatcaccggaatattgttgcgctgaccccagacctgaagctgttcaaccgcagctgcacggaaagtatcacccgccgccagcatcacgcttttaccctgctgctcaaactgacgcgccagcttaccaatcgtcgtggttttacccacaccgttgacgcccaccatcaggatcacaaacggcgctttgccttcaacattcagcggctcatcgactttcgccagaatctcgcccatctcttctttcagcaggccatagagcgcctcggcgtcacgaagctgcttgcgggatgcgccttccgtcagattggtgataattttacgtgtggtttccacacccacatcggcgatcaaaagctgctcttccagctcctcaaacagatcatcgtcgatttttttaccgcggaacaggctgataaatccggaaccgagattttctttggtttttaacaggctgcgtttcaggcgcgcgaaaaaaccttctttggtcggtttttcctgctcctgagcgatttcttccaccggctgctcttcttctgccggaggaaccaccatcaccgcctcttctgccgcttcggcagccagcgccgtttccagctcttcgtcggtaatttcttctttagccgcttcttcttccgccgcttcgacaatctctacggtttccgcttcagcctgccactcttctgggctaaccgcttcggcgttgacgtcttccggcaacggcagctcttcacgttcgatagccactggctccggcgtttcttctacgaccggttccggctgtgcaacgacttccgcttcaggctgcgctttttcactttcagcaacctgttcagtgacttccacaacgtcggcagcaaaagtttccgcctcggcttcagtatgcgcttgcggctgctcttcaacggcttgttcagaggccttcacaggctcttgcgcctgaacgatttcttctacaaccggttgttcattctgaacttctgtctctttttccggggtctgctctttttgaccaaagcccagccaggaaaaaaagccacgttttttttctttcgccatttgcgactacactcctcgctgttgcttcatggcacagcgttaacgctatgtacatagcagctaaaaaaatgatgaaatagtctatcacttaacttaattcacatcaccgcctgcaagtatgtgttatctggcggattgagcaatttatcatgaaaaaaccgaatcattccggcagcggccaaatccgcattattggcgggcagtggcgaggccgtaaactcccggttcctgatagcccaggtctgcgccccaccaccgaccgcgtacgcgaaacgttgtttaactggctggctccggtcattgttgacgcccaatgtctggattgcttcgccgggagcggcgcgctggggctggaagcgttaagccgctacgctgcgggggcaacgttgattgagatggatcgcgcggtttctcagcagttaattaagaatctggcgacactaaaagcaggcaatgcacgcgtggtgaacagcaacgcgatgagtttcctggcgcaaaaaggtacaccgcataatatcgtgtttgtcgatccaccgttccgccgtggcttgttagaagagacgataaatttactggaagataacggctggctggctgacgaagccctgatttatgtcgaaagcgaagtcgaaaacggtctgcccactgttccagcaaactggagtttacatcgggaaaaagtggcgggtcaggtggcttatcggctgtatcaacgcgaagcacaaggagaaagtgatgctgattaatattggtcgtttgttaatgctctgcgtttggggatttttaatcctcaacctggtgcatcccttcccacgcccgctgaatatcttcgttaacgtggcgctgatttttaccgtgctgatgcatggtatgcagctggcgctattgaaatccactttaccgaaagatggcccgcagatgaccaccgccgaaaaggtacggattttccttttcggcgtgtttgaactgctggcctggcagaagaaatttaaagttaaaaaataaccttattgttcgcctacaaagctgacaaagcgcgttcctttatagctcagcgtacctttatcgcccactgtcagggcgtggtactgctgggcgtcgaggcgaaacgtctgctccattcctccgctttgcggtttgaagcttgcctcatagcgtatactggtgcctgccggagtcacttcctgctggcggctacggcgatcgttaatcggtttttcccgcttgttgctcaccaccaccagcttttgctggagcggagccatatcattatcagctttttcccgtcgctgttgcataaaacgaaagcttgcggcgacgacaattaagccaatgataacaataaagaaaagaggtggtttgctcatctttatccctcatcggaaaatgcggaaataagcataccctgccagttatggtgttgtcatccgtccaccctcgccactaaactggaagcaagaccgtaggcattccgcttacgaaaaaataacgaattcaaggaactaagatgctttggagctttatcgctgtctgtctttccgcatggctatctgtggatgcaagctatcgtgggccaacctggcaacgctgggtgtttaaaccgttaacccttcttctcctgctgttactggcctggcaagcgccgatgttcgacgccattagctatctggtgctggcagggctgtgcgccagtctgctgggcgatgcgctaaccctgttgccacgtcaacgtctgatgtacgccatcggcgcgtttttcctcagccacctgctgtacaccatctatttcgccagtcagatgacgctctctttcttctggcctctaccactggtgctgctggttctgggtgcgctgttactggcgattatctggacgcgcctggaagagtaccgttggcctatctgcacgtttatcggcatgacgctggtgatggtgtggctggcaggtgaactgtggttcttccgtccgaccgctccggcgctctctgcgtttgttggcgctagcttgctgtttatcagtaactttgtctggctggggagccactatcgccgacgcttccgtgcggataacgcgattgctgcggcctgctactttgccggtcacttcctgatcgtccgcagcctgtatctctgataaaacttgactctggagtcgactccagagtgtatccttcggttaatgagaaaaaacttaaccggaggatgccatgagcactcctgacaatcacggcaagaaagcccctcaatttgctgcgttcaaaccgctaaccacggtacagaacgccaacgactgttgctgcgacggcgcatgttccagcacgccaactctctctgaaaacgtctccggcacccgctatagctggaaagtcagcggcatggactgcgccgcctgtgcgcgcaaggtagaaaatgccgtgcgccagcttgcaggcgtgaatcaggtgcaggtgttgttcgccaccgaaaaactggtggtcgatgccgacaatgacattcgtgcacaagttgaatctgcgctgcaaaaagcaggctattccctgcgcgatgaacaggccgccgaagaaccgcaagcaagtcgcctgaaagagaatctgccgctgattacgctaatcgtgatgatggcaatcagctggggtctggagcagttcaatcatccgttcgggcaactggcgtttatcgcgaccacgctggttgggctgtacccgattgctcgtcaggcattacggttgatcaaatccggcagctacttcgccattgaaaccttaatgagcgtagccgctattggtgcactgtttattggcgcaacggctgaagctgcgatggtgttgctgctgtttttgattggtgaacgactggaaggctgggccgccagccgcgcgcgtcagggcgttagcgcgttaatggcgctgaaaccagaaaccgccacgcgcctgcgtaagggtgagcgggaagaggtggcgattaacagcctgcgccctggcgatgtgattgaagtcgccgcaggtgggcgtttgcctgccgacggtaaactgctcagtccgtttgccagttttgatgaaagcgccctgaccggcgaatccattccggtggagcgcgcaacgggcgataaagtccctgctggtgccaccagcgtagaccgtctggtgacgttggaagtgctgagtgaaccgggagccagcgccattgaccggattctgaaactgatcgaagaagccgaagagcgtcgcgctcccattgagcggtttatcgaccgtttcagccgtatctatacgcccgcgattatggccgtcgctctgctggtgacgctggtgccaccgctgctgtttgccgccagctggcaggagtggatttataaagggctgacgctgctgctgattggctgcccgtgtgcgttagttatcagtacgcctgcggcgattacctccgggctggcggcggcagcgcgtcgtggggcgttgattaaaggcggagcggcgctggaacagctgggtcgtgttactcaggtggcgtttgataaaaccggtacgctgaccgtcggtaaaccgcgcgttaccgcgattcatccggcaacgggtattagtgaatctgaactgctgacactggcggcggcggtcgagcaaggcgcgacgcatccactggcgcaagccatcgtacgcgaagcacaggttgctgaactcgccattcccaccgccgaaagtcagcgggcgctggtcgggtctggcattgaagcgcaggttaacggtgagcgcgtattgatttgcgctgccgggaaacatcccgctgatgcatttactggtttaattaacgaactggaaagcgccgggcaaacggtagtgctggtagtacgtaacgatgacgtgcttggtgtcattgcgttacaggataccctgcgcgccgatgctgcaactgccatcagtgaactgaacgcgctgggcgtcaaaggggtgatcctcaccggcgataatccacgcgcagcggcggcaattgccggggagctggggctggagtttaaagcgggcctgttgccggaagataaagtcaaagcggtgaccgagctgaatcaacatgcgccgctggcgatggtcggtgacggtattaacgacgcgccagcgatgaaagctgccgccatcgggattgcaatgggtagcggcacagacgtggcgctggaaaccgccgacgcagcattaacccataaccacctgcgcggcctggtgcaaatgattgaactggcacgcgccactcacgccaatatccgccagaacatcactattgcgctggggctgaaagggatcttcctcgtcaccacgctgttagggatgaccgggttgtggctggcagtgctggcagatacgggggcgacggtgctggtgacagcgaatgcgttaagattgttgcgcaggagataaggcaaaccgatcgcaacattgagcgcgatcggtcccctcgcccctctggggagagggttagggtgaggggaaaaggcggcatcgaagccaatcagcccctatcaaccgcctttacgaatcaaataacgataaggcagtccatccgtctctttagcaaccagttcgtgttccataaaggtacaaaacccaggaatatcgcgggtagtggccggatcgtcggcgataatcagcaacgtttcgccaggctgcatattgcgcacggttttgcgcaccatcatcaccggttccgggcagcgcaggccaagcgcgtcgagtgtgtggtcagggctggaaaagagatcggtcattttcttctcatcacttaaaaaaacggcgctagtttacgccctgtgagtccgtaagcaaactaggttaacgattgcgtgaaaattaaccattgcattgtcaacgtaaagcagtatcatgcggcggctcgaaaaaagggtaagcacgttattatgttaaggtaacagacgtgtcgtacgtattgggttccctcaccccaatggttaatcaaaaaggtacaatatgaacgttttcagccaaactcaacgctataaggcgttgttctggttaagcttatttcatctgctggtgatcacctccagtaactatctggttcagcttcccgtctccattttgggtttccataccacctggggcgcgtttagctttccgtttatttttcttgctaccgacctgaccgtgcgtatttttggcgcaccgctggcccgacgcattatcttcgcggtaatgatccctgcgttattaatctcctacgtcatcagcagcctattctatatgggttcctggcagggattcggcgcactcgcccacttcaacctgtttgtcgcccgtatcgccaccgccagtttcatggcctacgcgctggggcaaatcctcgacgtgcacgtttttaaccgcctgcgtcagagtcgccgctggtggctggcaccgacagcgtccacactgttcggtaacgtcagcgacacgctggcctttttcttcattgccttctggcgtagcccggatgcctttatggctgaacactggatggaaatcgcgctggtcgattactgtttcaaagtgttaatcagtatcgttttcttcctgccaatgtatggcgtattactcaatatgctgttgaaaagactggcagataaatccgaaatcaacgctttgcaggcgagttaaaggttcgttatcagagttgtgataagatggatgaatgagccgttatggccgtttatcgaaaggaagaagtcaatgcgcaatctggttaaatatgtcggaattggcctgctggttatggggcttgcggcctgtgatgataaagacactaacgctacggcgcagggtagcgtcgcggaaagtaacgctaccgggaatcccgtcaacctgcttgatggcaagttaagtttcagcctgccagcggatatgaccgaccagagcggtaagctgggaacgcaggccaataacatgcatgtctggtccgacgccaccgggcagaaagcagtcatcgtcatcatgggcgatgatccgaaagaagatctggcggtgctggcgaagcgtctggaagatcagcaacgtagccgcgatccgcagctgcaagtggtaaccaataaagccattgagctgaaaggtcacaaaatgcagcagttagacagtattatctccgcgaaaggccagacggcgtactcttccgttattctgggtaacgtgggtaatcaactgctgaccatgcaaattacgctgcccgctgacgatcagcaaaaagcgcagaccaccgcagaaaacatcattaatacgctggttattcagtaagttttaagaactactggcggcctcagggacgtgttccggaggccgtttttttaatcgccacgtcagtaataacgcgattgcgaccagtcccgccgccgccagataaatcaccggtacgcccgcccagctcatcaccagcccagccagtggtccagtcacgccaaggcttaaatccataaatacggtgtaagttgccagcgccgccccctgattttgctgcggaaccgcttttaccgccactacacccaatgccgggaacaccaggctaaacccggcccccgccagtaagacgccgattttcgccatccacggcatagtcgccacgccaaccagtagcaggccgattatctcaacgctaaagcaaatcatcgctacgtttaagccaccgatacggttaatgccgttagggaataacaaacgcgtaccgacaaacgcacagctaaacagcgtcagcgcgaaagccgcaccgtcccaacctttagcgtcataaaacagcgtgataaaggtggcgatgacgccaaatccggcggaagccagtgccagcgccataccgtacagccagacgcgcccaagcaccgcgcgaaacggcagcggtttgcctttactggcttttaccgtcggacgcgggatcgccaacaaaatggccaccagcgccacgcccataatgattaacgctaacgcctgcaagccgccccagtgataaaacacgacgcctaacggcgcacccatcgccatcgccccgtaagtgacaatgccgttccagctaatcacccgcccgatatgcaggctgccaaccacgccaacgccccatagggtgcttcccgttccggcaaaactttgcccaatcccaaggatgacgcgccccaggcaaagtaataacaggctgatgacaggcagactggcggttaatcctgccgtcagataccccagaccgctcaaaaagcagccgcataaaccgaagacgacaatctttttgggtcccaggctatcggcgtaacgtccggcatgagggcggctcagcaaggtggcgaaatattgcaggctgataaccaatcctgcccagaaggcgctaaagcccatcacatcatggacatagcccggtaatacagcgagcggcaacccgatggtgaggtagctggcgaagttaaacatgactatagagacaatgcgcaaattcaggcgcaatccgtttagcgcgggttcggctacgggttcgggcatgaggatcaccacatttttacaacagtgtttcatttttaccacgtgctgacgtgaaaatcagcagtaagaatcagaatattgctggcgtgactcccgctacacttaatacaaaaagtcacaaggaagccccaatggaaacccctcaacccgataaaacgggcatgcacattctgctcaagctggccagcctggtagtgatcctcgcgggcattcacgcagcggcagatatcattgtgcagctgttactggcgctgttttttgccatcgtcctcaacccgctcgtcacctggtttattcgtcggggagtacaacgccccgttgccattacgattgtagtggtggtgatgctgatcgcactaaccgcgctggtcggcgtactggcggcaagctttaacgaatttatctctatgctgccgaagtttaataaggagctgacgcgcaaactttttaaattgcaggagatgttgccttttcttaatttgcatatgagcccggagcgaatgctgcagcggatggacagcgaaaaagtggttaccttcaccacagcgctaatgaccgggctttccggggcaatggcgagcgtgcttttgctggtgatgaccgtagtttttatgctgtttgaagtgcgccacgtcccttacaaaatgcgttttgcgctgaataatccacagattcacatcgcgggattacaccgcgcacttaaaggcgttagccactatcttgcattgaagacgctactcagtttatggacaggtgtcatcgtctggctggggctggagctgatgggggtgcagtttgcgctgatgtgggcagtactggcgtttttgctcaactacgtgcccaatatcggcgcggtaatttccgccgtaccgccaatgattcaggtgctgctgtttaatggtgtttacgaatgtattctggtcggcgcattgtttttagtggtccatatggtcatcggcaatattttagaaccacggatgatgggccatcgcctggggatgtccaccatggtggtatttcttagtttgttaatttggggatggctgctcggcccggtagggatgctacttagcgtgccattaaccagcgtgtgtaaaatctggatggaaaccaccaaaggcggtagcaaactggcgattttactggggccgggcagaccgaaaagtcggttaccgggatgaggcgacaagtgatacgatacgcactttcattttccattaaacgttggccctgatatgtatcggatagttctggggaaagttagcaccttaagcgcagctccactgccaccgggtttacgcgagcaagcaccgcaaggtccacgacgcgaacgctggctggcggggcgtgcattgcttagccacacgctttccccgctaccggagatcatctatggcgaacaaggcaaacctgcatttgcgccggaaatgccgctatggttcaacttaagccatagcggtgacgatatcgccctgctgttgagtgatgaaggcgaagtcggctgcgatatcgaagtgattcgcccgcgcgccaactggcgctggctggcgaacgccgtattcagcctcggggaacacgctgagatggacgccgtgcatcctgatcagcaactggaaatgttctggcgcatctggacgcgcaaagaagccatcgttaaacagcgtggcggcagcgcctggcaaatcgtcagcgtagacagcacctatcactccagcctgagtgtcagccattgtcagcttgaaaatttaagccttgcgatctgcacccctactccctttacgctcaccgccgacagtgtgcaatggatcgatagtgttaactgatccgcccacccgactgcccatctattgatccagaacaggtaatcagtatgacgaatacttaaaatcgtcatacttatttccgccatctattttaatccattggggttaccatgctctccacactccgccgcactctatttgcgctgctggcttgtgcgtcttttatcgtccatgccgctgcaccagatgaaatcaccaccgcctggccggtgaatgtcgggccactaaacccgcacctttacacgcctaaccagatgttcgcccagagcatggtttatgaaccattggtgaaatatcaggcagacggtagcgtgatcccgtggctggcaaaaagctggactcatagtgaagatggtaaaacctggaccttcaccctgcgtgatgacgtgaaattctccaacggtgaaccgctcgatgccgaggcggcggcagaaaacttccgcgcagtgctcgataaccgtcaacgtcacgcctggctggagctggcaaaccagattgttgatgttaaagcactcagtaaaacagagctgcaaattaccctgaaaagcgcctactatcctttcctgcaagaactggccctgccccgtcctttccgttttatcgctcccagccagtttaaaaaccatgaaaccatgaacggaattaaagcgccgattggcaccggaccgtggattttgcaggaaagcaaactgaatcagtacgatgtcttcgtccgtaacgaaaactactggggcgaaaagccagcgattaaaaagatcacctttaacgtcatcccggacccgactacccgcgcggtggcgtttgaaactggcgatatcgacctgctgtacggaaacgaagggttattaccgctcgataccttcgcccgctttagccagaatccggcttaccacacccaactgagtcagccgatcgaaaccgtgatgctggcgctcaataccgccaaagcccccaccaacgagctggcagtacgtgaagctcttaattacgcggtaaacaaaaaaagcctgattgataacgcgttgtatggcacccagcaggtcgccgacaccctgtttgccccttctgtgccctacgccaacctcggcctgaaaccgagccagtacgatccgcaaaaagcgaaagcgttgctggaaaaagccggttggacgctgcctgcgggcaaagacatccgcgagaaaaatggtcagccgctgcgcattgaacttagcttcatcggcaccgatgcgttaagcaaaagcatggcggaaatcattcaggctgatatgcgccagattggcgcagatgtcagcctgattggcgaagaagagagcagtatctatgctcgtcagcgcgacggtcgttttggcatgattttccaccgcacctggggcgcgccatatgatccacacgccttcctcagtagtatgcgcgtaccgagtcacgctgacttccaggcacagcaaggattagccgacaaaccgctgattgataaagagatcggcgaagtgctggcgacccatgacgaaacgcaacgtcaggcgctgtatcgcgacattctgacccgtctgcatgacgaggcggtttatctgcctatcagttacatcagtatgatggtggtaagtaaaccggagctgggtaacatcccctacgcgccgatcgccaccgaaattccgttcgaacagattaaaccggtgaaaccttaatgttgcgttacgtattacgccgctttctgctgctgatcccgatggtgctcgccgccagcgtgatcatttttctgatgctgcgcctcggtaccggcgacccggcgctcgattatttgcgtctgtctaacctgccgccgacgccggagatgctggcctctacccgcaccatgctgggactggatcagccgctgtacgtccagtacggcacctggttgtggaaggcgctgcatcttgactttggtatcagtttcgccagccaacgcccggtactggacgatatgctgaacttcctgcccgccacgctggaacttgcaggtgcggcgctggtattaattctgctcacttccgtaccgctcggtatctgggcggcgcgccatcgcgaccgtctgccggatttcgccgtacgtttcatcgcgtttcttggcgtgagcatgcctaacttctggctggcgtttttactggtgatggcgtttagcgtgtatctgcaatggctacccgcgatgggttacggcggctggcagcacatcattttgcctgcggtttccattgcctttatgagcctggcgattaacgcgcgtttactgcgcgccagtatgctggacgtcgccggtcagcgtcacgtcacctgggcgcgtctgcgcggcctgaacgacaaacagaccgaacgtcgccacatcctgcgcaatgccagcctgccgatgatcaccgccgtggggatgcatatcggcgaactgattggcgggacgatgattatcgaaaacatctttgcctggccgggcgtcgggcgctatgcggtgagcgcgatttttaaccgtgactatccggtgatccagtgctttacgctgatgatggtggtggtttttgtggtctgtaatttgattgtcgatttgctcaacgccgcgctggacccgcgcattcgtcgtcatgaaggagcgcacgcgtgaactttttcctctcttcccgctggagcgtacgcctggcgctgatcattatcgccctgctggcgctgattgcgctcaccagccagtggtggctgccgtatgacccacaggcgattgatttgccgagccgcctgcttagcccggatgcgcagcactggctgggcaccgatcacttaggtcgcgatattttcagccggctgatggcagcgacccgcgtgagcctcggtagcgtaatggcctgcctgctgctggtgctgacattagggctggttattggcggcagcgccgggttgattggcgggcgcgttgatcaggccaccatgcgcgtcgccgatatgtttatgaccttcccgaccagcattctgagcttctttatggttggcgtgctcggcaccgggctgaccaacgtaattatcgccatcgccctgagccactgggcgtggtatgcacgcatggtgcgcagcctggtgattagtctacgccaacgcgagtttgtgctggcgagtcggctttccggtgcgggccatgtgcgggtgtttgtcgatcatctggcaggcgcggtgatccctagcctgctggtgctggcaacgctggatatcggccatatgatgctgcacgtcgcggggatgtctttccttggcctcggtgtgaccgcgccgaccgccgaatggggcgtgatgattaacgacgcgcgccagtatatctggacccagccgctgcaaatgttctggccggggctggcgctgtttatcagcgtgatggcctttaacctggtgggtgacgcactgcgcgatcatctggaccctcatctggtgacggagcacgcacactaatgccgcaacagattgaactacgtaatatcgcgctacaggccgcgcagccgctggtacacggtgtaagcttaaccctgcaacgcgggcgcgtgctggcgttagtcggcggtagcggcagcgggaaaagtttaacctgcgccgcaacgctgggcattttgcccgctggcgttcgccagacggcgggggaaattttagccgatggcaaaccggttagcccttgcgccctgcgcggcatcaaaattgccaccatcatgcagaacccgcgcagcgcctttaatccactgcacaccatgcacacccacgcgcgggaaacctgcctggcgttagggaaacccgccgatgacgctacgcttaccgctgccatagaagcggtggggctggaaaacgccgcgcgcgtgctgaagctgtacccgttcgagatgagcggcggcatgttgcagcgcatgatgattgcgatggcggtgctgtgtgaaagtccgtttatcatcgccgatgaaccgaccaccgaccttgacgtggtagcacaggcgcgcatcctcgatctgctggaaagcattatgcaaaaacaagcgccgggaatgctgctggtgacccatgatatgggcgttgtggcgcgtctggcggatgacgtggcggtgatgtctgacggtaagattgtcgaacagggcgatgtagaaacgctgtttaacgcccccaaacatacagtgacgcgcagcctggtttccgctcatctcgccctctacggtatggagctggcaagttgacctaatacggtatggagctggcatcatgactttacttaacatctccggcctttcccatcactatgcgcacggtggatttaacggaaaacatcaacatcaggcggtgctgaataacgtttccctgaccctgaaaagcggcgaaaccgtcgccctgctggggcgcagcggctgcgggaaaagtaccctcgcgcggttgctggtgggtttagaaagccccgcgcaggggaatattagctggcgtggcgaaccgctggcgaaactcaatcgcgcccagcgtaaagcgttccgccgcgatattcagatggtatttcaggactccatcagcgccgtgaatccgcgcaaaaccgtgcgcgagatcctgcgtgaaccgatgcgccacctgctaagtctgaaaaaatccgaacaactggcgcgcgccagcgaaatgctgaaggcggtcgatctcgatgacagcgttctcgacaaacgcccaccgcagttaagcggcggccagctccagcgcgtctgcctggctcgcgcgctggcggtcgaaccgaaactactgattctggatgaagccgtttctaaccttgatctcgtgttacaggcgggtgtcattcgcctgctgaaaaagctacaacaacagtttggcaccgcctgcctgttcatcacccacgacttacgcctggtagaacgcttttgccagcgggtaatggttatggacaacggacaaatcgtcgaaacccaggtggtgggagagaaattaaccttttcctctgacgccggacgtgtgctacaaaacgcggtattacccgcattccccgtgcgccgtcgcaccacagaaaaggtttaacgcaaatgcaacgagtcaccatcacgcttgatgacgatttactggagacgctggacagcctgagccagcgtcgtggttataacaaccgttccgaagctatccgcgacattctgcgtagcgccctggcgcaagaggccacccagcagcacggcacgcaaggtttcgcggtgctgagctatgtgtatgaacacgaaaaacgcgacttagccagccgcattgtctccacccagcatcatcaccacgacctctccgtcgccacgctgcatgtgcacatcaaccacgacgactgtctggaaatcgccgtgttgaaaggtgacatgggtgacgtgcagcattttgccgatgacgttatcgcccagcgcggcgtgcggcacgggcatttgcagtgcttgccgaaggaagattgagttacgccattgtcccaatcgtcttcctgaatcgcagcagcgcaatggtgaaaaatgcgccgccaattgccatcagcgtcagaaactgcggccagacgatttcgaatccggcaccccggtagaggatggcctgcgcgaggctaacaaagtgtgtcgtcggcatggtcagcataatgtcctgcaccatctgcggcatactttcgcgcggcgtggaaccaccggaaagcatttgcagcggcagcagcaccagaatcaccagcagccccagttgcggcatactacgcgctatcgtccccataaaaatgccgatactcgtggtggcaaacagactgagcgccacgcccagcataaacagcgggatgctgccttcaatcggtacgcccagtacacctttcaccatcagcaccaggcttaatccgcttaccaccagcaccaccagccccatgctccagatcttcgccatcatgatctcaaacggcgttatcggcatcaccagtaagtgttccaccgtgccgtgttcacgctcgcggatcagcgcgcttccggtcaatacaatcgccagcatggtaatgttgttgatgatcgccatcaccccgccaaaccacgcgggatcgaggttcgggttaaagcgcatccgggtttccaggcttaccaacggttcgctgttatcacggtagcgcgcgacaaagctgttcacttcaccgttgataatattctggatatacccattgccggtaaatgcctggctcatgcgcgtggcatcgacgttcacctgaatatccggctggcgtccggcgaggacatcacgctgaaaattaggcggaatatttatcgcgaaggtatagcgtccggcgtccagtccggcatccatctcatcggcggtgatcatctccggtggcaaaaaccacggacgatagaagctgttaacgatccggttgcttaactggctttgatccatatcggcaatggcgatcggcgcgaggttcaagcttcctggcgtaacggtcgcactgctatacacgctcaccgtaaagctgaagacaatcagcgtcagcatcgctttatcaccgagcagactgcgcaactctttgatacccagattaaaaatattgcgtaaatggcgcatcatccctcctgttttttcagcagcaggatacttaagcccatcaccagcgggatggctatcagtaacgggataaaaagttgccacaaatcagtcagatccagcgctttgctgaacgtcccgcgggcgatagtcagaaaatgactggtcgggtaaacctcgccgatccaacgtccaggcccttccaggctagctaccggatcgatcatcccggaaaactgtgtcgccgggatcaacgtgataatcgccgttccgaaaatggcggcaatctggcttttcataaaggtggagatcagcagccccattccggtggcaatgatgatatacagcagcgccgccagggtgagcgtcaggaaactgcctttatgcggtacgccaaacacaaacacgctcaggccgcagagcaggaaaaagttcagcatccccagcgcgatgtatggcaactgtttaccaagcaaaaattcactacgcgtggtgggggtcacgtaaaggttgataatgctcccaagctctttttcccgcaccacgctaagggcgcttagcatactcgggatcatcatcagcagaagcgggatcaccgccggaacaatcgctggcaggctttttacgtccgggttatagcgatagcgcgtctcaatattcatcagcccgctttggctggcgggtgtgctttgtcggctcgccacatcctgtaaccagctctggtgcatggcctgcacgtaaccttttaccgtttcagcacggctcggcatcgctccgtcgatccagacgccgagttccacaggcgtaccacgcgcgatatcgcgcccgaaattgggcgggatctcaatcgccaccgtgatatcgcccgcacgcatccgacgatcaagctcgtcataactggtgagcggcggctgttcgataaagtaacgggaaccggagaggttgagtgtccacgcctggctactgacggtctggtcgcggtcgagcaccgcaaagcgcaggttttccacatccatactgatgccgtaacccattatcagcatcaggatcaccgttcccatcagcgccagcgtgctacgtactggatcgcgtcgcagttccagcgcttcgcggcggctgtagctaaacagacggcgcaggctaaatccctgacgcggcgcgtgggtggtgtcgtgtaccacgggcggcgcttcggcttcgttgctctgccctgccgcttcctgcaaataggcgataaatgcctcttccagactggcggctccgcgtttctcaaccagttcctgcggtgtaccgctggcaagcacttttccggcgtgcatcagactgatgcggtcgcaacgttccgcttcgttcataaagtgggtggagatgaagatagtcactttgtcctggcggctgagatcgaccatcaactgccagaacatatccctcgccaccggatcgacaccagaagtaggctcatcgaggattaacatctccgggcgatgaatcaccgccaccgccaggctaagccgctggcgaatgccgagcggcaaactctccggcagaatatcttcaacgtcgttgagcttaaaacgctcgctcatttcagccactcttgcgggaatttccgcttccgggatgtgaaacaaacgggcatgtaactcaaggttttgccgcacggtgagttcgttatagaggctaaacgcctggctcatatagcccacccgacggcgggtatcgatatcttttggatcaaccggttgcccgaacagccacgcctcaccttcgctggcgggcagcagtccggtgagcattttcatggtggtggatttaccgcagccgttgctaccaagaaaaccaaaaatctccccgcgtggaatgcggaaattaacgtgatcaacggcaacgaaggaaccaaaacgcatggtcagatcgcgcgcttcgatggcaatctctgcgttttcaggttgatacggtgggatcactaccgcctgatgcgcctggcgttgcgcttgcggtaacagatttataaatgcttcttccagcgtagcgctttgcgtttgctgccgtagctcttcggcgctgccagttgccagcacttctccggcattcatcgctaccagccagtcgaagcgttcggcctcttccatataggcggtggcgaccagcacgctcatattgctctgccgctggcgaatactgtcgatcagatcccagaactgggagcgggagagcgggtcaacccccgttgttggctcatcaaggatcaacagttccgggtcgtggattaacgcgcagcacagcccaagtttttgcttcatcccgccggagagtttccctgccggacgatcgcgaaacggtgctaacccggtgctggtcagcagctcattgattcgcacttcccgctccgctttgtcgtgaccgaacaggcgagcgaaaaaatcgacgttttcatacacgctcaaggtgtggtagaggtttttgcccagcccctgcggcatccaggcgatgcgcgggcagacgtcgcggcgatgcttcgggtcgcgcatatcgccgcccagcaccatcacattgccctgttcaatgacgcgggcaccggaaatcaagctcaacaagctgctcttcccgacgccgtccgggccaatcagcccgaccatacagcgggccggaatatcgagagtgatattgttcagcgcaacggtttttccataatgctggctcacgcccgccagttgcgcgacaggcgggacgggaaccagttccagatgcgtcattgcggcaacctcaccacgaggtcgtcaggccacggaagttcttcattcacccgcacccacgctacgcccggcaaaccggttttgacatattccagatgctgctggagtaattccggtgggatacgcgctttgacgcggaacatcagtttcagccgttcatcgctggtttcgacggtttttggcgtgaactgggcgacactggcgacaaaactgatggttgcaggaatacgcagatctggcgcggcatcgaggatcagccgggcttcaccgcccagtttcagcgtgcccgcctgttcggttggcaggaagaaagtcatatagacgtcgctgagatcgaccatattcagcacccgaccgcctgccgccagcacttcgcctggctcggcaacccgatactgcacgcgtccgtcacgcggggctttcagttcgctgtcatcgatatctgcggcaatgcgccgttcagtggcttgtgccgcttcgacgcgggtttgcgcctgaatgatattggtgcgtgccgcttctatagccgctttagaagcgcttacctgagctttcgcgctttccagcgcagctcgggcgctctcagcggcggcgcgatcgtcatccagctgttgcgcagaaatagcccctcgttgggccagactacgggaacgcgtatgacgttttgctacggagtccagttctgcctggcgttgattaaccaggctctgtgcggcacgagtttcgctttgtcgttgctccagcaaagcctgcgcggcagcaacggcgctttgtgcctctttgatttgcgcgatggcttccagtcgctgttcctgcaacacgcgagtatccatcttcgccagcacttcaccttcgcgaacaaacttgccttctttcaccagaatggtgtcgatacgcccggcaattttgctggcaatatccacttccgtcgcttcaatgcgcccattactgacagcaaagccttccggcacacctgccgggcgcaacagccaccacgccacgatagccgccaccgccagtaacccgacaacccaccacgccagatggcgcttactcttatccataatcgacccgccataatccctgtaagcaaacgacgcgtgttacaactgccgccgaacgacgttcagcggattcttccatccgggataagaaggaaacggcaaatacgaccagcgcgcagagcattgagcgccaacggggaaggcttagtgaaaacgggtagtaatgttgtcatcatcagcattcctggccgtaaatgaaacacgcatactcataagtgtgatctataaaactggctgacaaaacggtatccatcctgttggatagcgtttcacgcctgttcagttgcaggaacagagcattcctttttacgttttatcaacagtctcaaccagatagtaacattaatattcatgttgtctatggttcagagctgtaacattgtgcgccttctaatcaaaggcataagtccatttctgtttttttcatgctggtaagacttccagggagtggttatctcaggccctgcaccagggttaatttggcaattatgcatgctgaacattcttccagcatgtttactgtcacgggcgttaagacctaaaactgtccccgtttcgcctatgcgttctcttccaccatttccgttatgtgcaacaacttgatttatacctaacatttgactacatgctaatagtgcttcaagtttaggtctgtaatctgtgctaacagaaaaataacgattaaaggatcgacaagagatagcccggctagttttaaactttttgccattaattatagcatgatgctttttattgataattgccgctaattcgaccggatcgagagcattggtcatttcatcaatagagactgttatcggtcctataatgtaacgttttcgctgatcatcaaaagttatcccatgatgatttgccattattttgtatttggggtcatagaaacatacaggataatcttttatcccagagtaggtatcctcatcgagtggtttcatacgcgtgaagttctgcatatagttaccattgcaattcgtttcatgatttccagctaatacatgaacattttcattgatactcattatgcgttttaacaaatcgatgataaattgatcaccacagatattgctaaatcgatcgccggtttggtcgcccagaaacgtacatggcgtcacagcgtctttattaataactaaataaggctgaagactttctaaaataatgtctcttctgttcaggatactgattattgtattaacattagtgttaagttgctcattaaagttctcccttagcaatacgttgagaacttcatcttctatattaagcaactggctaaggaaattttctccttcagccatgattcccaaatgtcccgttgcgaaaagcgcgaacaaaactgcaccgacactgccatcggtatcaccaaaataggttggtctggtacttgtgggatcaacgggtaaacaattggagaaatagattctgtcagcgaactggggttttatcattgtttcgaatttaatatcagatacattatattggcttattttccagttccagatgggtttgtagctctcagtaactgcaacatcattagcattatcatttactgtcatattattaagtaaataaacaatactgcaccaattaatatcggtattatcaagagagcaaccgtaatttttgctattaattgtcacaataaactgataattattattcctacgtagaatatgagcacgcatgccgcttagcatactatatttttcactatgatccgtttgtatggtaaaactaattttgtcatcttgaatagattgttggaaccgttctatttgccaatcatctattttttccacaacctcaccgagcattgtcctggcaatactacttatatcatcacctataccatttgcaatatacccaaacagttctttagtgaagttggtaacatgctcttgcaccatatcatttgttgcgattgtcgttgtactgtcgttagtgcctgccacagttccaattttcatattttacctcatattatttaccgcgaggaatacatagttaacattttatcttatgacatacacctcatgttcgatgggaaaataattatattttgcacaaatcattcagcctcaaagcataatatgaaatttcttatctcatagcagagaaagtccctaaagattgtagaggcgtcatcagaacatgcctctacaatcgattaagaaaacctatgaaatactggcaggattaaaaagacataccaccgtattcatggagttttaatgtagttgaaaacaactaagcccactggaataaattattttattatttttatcacgtgcttccttcagggaatttagccccataataccattatcaaattgttgattatgatctaccccgggcccatgatgcccatatttttgtctaatgtatttgctggggtcttcacctttgagtgtctccccacatatgaagatacgttcacgtgctggtctgaaatcagtagtgttatcaaaataattagcatatacaggtgtgggtttcaaagtattgcttcggattagatggaatagaggatcatccatgtgttctttatgttttttattaaaaatattggctaattcctcaggatcagtaggatttttcatctgattaaatggaacctgcaaagcacgctgacaataacatttttttcttcatctcttattattccgtgatgactggttaaaacttgcctttcactgtcataattacaaacatcgagcgttttaattaagttatacgtatcaccggcagagagtttatgatttgctagtcgtgcagtatagttaccattaaaattgatttcatgatttccagccagaacgacgacatttttattaatacggctatctttattaccctccatatttcgcatagaatttagcaaagtaaggatatatttatcaccaaaaatagtactaaatctatcgcctgtatgatccccaaggaagatacaaggggttatcgcatcgtcctttaaaaaaacatgttgatgcaactcattcaagatcatgtctctcgtatttaataaatcgtagagcactttattatttttatgtttgtatgcagaactagccatctcttcgtgttttaataattcacataataaactccaacccttttccctgatgcctatatgcccactaacgagcaatgcataaagtacagcgcctactcttccatctgtatcgccaaaataagccgtgttggcattttgtgggttaatcacgccacactgtttatagaagtctattttactaaacacagatttaacatagctatcaaacttttccttagtaaacgtctctttagagacatcccaacgccagtcaggtttgaaattaccactaagaagagtaaagaaatttctcgctatgatagaaagcccatcaactttataaattatatcacttttatctccagaggaattaataaaataataaccgcccttacactcaacagtaacggtaatgggagagcttaattttaacacatggttattgtctggtataattgtaaagataaacgtatcagtagtattgtcggcgaatctattatattcttgaatatctatagaaggttcactattataaaaccatactttctccatctggtgactacgatcatttaccttccagtgaccatgttgcaggaaatagatgatatgcaggccaaaatcgttatctatttggctatcattatccagtttatcaaattcaactatctttgcacgatgtgttttatcaaccttgccatggtgttgatgactgttaactttatcactatgcttatcttgatggctactagagatgtttctaatctgattgtcaattgctttcataaataacctgtgatatttttgaattgtttgtaacaaaataaatgatacttgtctgaaaaacagatttacgacgatataaaataataatacttatatgttcgctgattttaagcaccgagactatccggtcttttaccaaataatgaagaataatccctccctggaagataattgtaaaaaacaacagcataagaattaatcttaggataaatttttatttatcatggccttttgaacgctgaaaagtagcgctctgcaaagtaaaccccgctatagttatgctatgcatttgtctttaatgatatctcgtcattatattaacaggatgaaattatcattaatgcatatttcaatattagcagggatacctgaggagtttaaagtgaacatatatatcgggtggcttttcaaattaatccctttgattatgggcttaatttgtatcgcgttaggtggctttgtgctggaaagtagtgggcaaagcgagtatttcgtcgcgggtcatgtgctgatttctctggcggccatatgcctggcattattcactaccgcatttattatcattagccagctcacgcgcggcgttaatacgttttacaatacattgttccccattattggctatgcggggagtattatcaccatgatatggggttgggcactgttagcaggcaatgatgtgatggcagacgagtttgtcgccggccatgttattttcggcgttggtatgattgccgcctgtgtaagcacggtggcagcgagttccggtcactttctgctcattcccaaaaatgcagcggggagcaagagcgacggaacaccggtacaggcttattctagtttaatcggtaactgcctcattgccgttcccgttttactcaccctgctcggtttcatttggtctattacgctgttacgtagtgctgacataactccgcattatgtcgcgggtcacgtattgcttgggttaaccgcaatctgtgcctgtctaattggccttgttgccacaattgtccatcaaacacgtaatacgtttagtactaaagaacactggctgtggtgttattgggttatttttctcggcagtatcacggtactgcaggggatatacgtcttagtcagttccgatgcaagcgcccgactggctcccggcattattcttatttgcctcggaatgatctgttacagcatattcagtaaagtctggctactggcactggtatggagacgtacctgtagcttagccaacagaataccgatgattcccgtcttcacctgcctgttttgccttttcctggcaagctttcttgcggaaatggcgcagaccgacatgggatattttattcctagccgagttctggtcggtttgggagcggtatgctttacgttgttcagtatcgttagtatattagaagcgggttctgctaaaaaataattgcaacgtaccggataaaaccagcgttgaccatttgcgtaacgctggtttttcttaggcatcatgaaataacgcagcattaatgcatagtggttaagtataaaaaacagcaaagttactgtttttttcaacctgttcatatttcataaagatctggccactgagtgagttttcaatcacctttccatccaccttatattaagcatggagggtttcagttcacgggctcattagaaaataatcacaagataaccactatcaaaattagctcatttttaatgcgactctaataattttcatctttaggaaataggtcaggagctctttgctgcaatcaaatcctgcgcacaagcccacgcactgctccacgcccactggaagttatagccccccagccagccggtgacgtccatcacttcgccgatgaagtacagcccaggcactttgcgcgcttccatcgtccgactagagagttcgttggtgtccacgccgccgagcgtcacttcggcagtgcgatagccttcagtgccgttgggttgtacgcgccagtcggtcaatgtgctaatcagtgcctgttggtcacgcacgttgagctgttttaggctaacatccgggatttgcccgagttgctgtaagcgttcaaccaaccgcttcggtagatgaaccgccagtgtgtttttcaggctttgattcggatgtgcgttacgctgctcattcaggaaggtttcgaggtccacatccggtagcagattgatgctgacaaattcccccggttgccagtagctactaatctgcaacaccgccggtccagacaagccgcggtgggtgaagagtaagttctcacggaaaacggtgccgttttcagcggtaatcacggaaggcaccgccacgcccgccagcacctgtaactcttcgagcaacggtttatgcagagtgaatggcaccagacccgcgcgggtcggcagcacgttgaggccaaattgttcggcaatcttataaccaaacgggctcgcgcccagccccggcatactcagcccaccagtcgcgatgaccagcttttcgcaaccgacagtcatgccgttcagatcaagcgtgaagcctgtttcatccttcgccacactcagcacttcgctacgcaatctgaaggtcacattgcccttctcgcactcatccaccagcatgtcgacaatctgctgcgcggagtcatcgcagaagagttgccctaacgttttctcgtgccaggcgatgccgtgtttattgaccagatcaatgaaatcccactgggtaaaacgtgcgagtgcagacttacaaaaatgcggattctggctcagataagcgcctggttcgacataaaggttggtaaagttgcagcgcccaccgccagacataaggattttgcgccctggttttttaccattatcgatcagcagaacccggcgtcctgcctgacctgccagcgcagaacagaacatacccgccgcaccagcgcctataataatggcatcaaacctttccacgttgcgctcctcttagaaaaaacgggcgtgaattgtaaagattcctcagtggtcgcaccagcatcaatattactaaaaggaagtatttgcctgaattatataagataattattttttgagtgaaatccatacagggggcaaatcaaaaaaagtctatatttcactttgcccgcgccgcgaaagtcactgataatgcgccgcgttcatgtcctcaaaatggcgtaacgtcctatgctacatttgtttgctggcctggatttgcataccgggctgttattattgcttgcactggcttttgtgctgttctacgaagccatcaatggtttccatgacacagccaacgccgtggcaaccgttatctatacccgcgcgatgcgttctcagctcgccgtggttatggcggcggtattcaactttttgggtgttttgctgggtggtctgagtgttgcctatgccattgtgcatatgctgccgacggatctgctgcttaatatgggaagctctcatggccttgccatggtgttctctatgttgctggcggcgattatctggaacctgggtacctggtactttggtttacctgcatccagctctcatacgctgattggcgcgatcatcgggattggtttaaccaatgcgttgatgaccgggacgagtgtggtggatgcactcaatatcccgaaagtattaagtattttcggttctctgatcgtttcccctattgtcggcctggtgtttgctggcggtctgattttcttgctgcgtcgctactggagcggcaccaagaaacgcgcccgtatccacctgaccccagcggagcgtgaaaagaaagacggcaagaaaaagccgccgttctggacgcgtattgcgctgatcctttccgctatcggcgtggcgtttagccacggcgcgaacgatggtcagaaaggcattggtctggttatgttggtattgattggcgtcgcgccagcaggcttcgtggtgaacatgaatgccactggctacgaaatcacccgtacccgtgatgccatcaacaacgtcgaagcttactttgagcagcatcctgcgctgctcaaacaggctaccggtgctgatcagttagtaccggctccggaagctggcgcaacgcaacctgcggagttccactgccatccgagcaataccattaacgcgctcaaccgcctgaaaggtatgttgaccaccgatgtggaaagctacgacaagctgagccttgatcaacgtagccagatgcgccgcattatgctgtgcgtttctgacactatcgacaaagtggtgaagatgcctggcgtgagtgctgacgatcagcgcctgttgaagaaactgaagtccgacatgcttagcaccatcgagtatgcaccggtgtggatcatcatggcggtcgcgctggcgttaggtatcggtacgatgattggctggcgccgtgtggcaacgactatcggtgagaaaatcggtaagaaaggcatgacctacgctcaggggatgtctgcccagatgacggcggcagtgtctatcggcctggcgagttataccgggatgccggtttccactactcacgtactctcctcttctgtcgcggggacgatggtggtagatggtggcggcttacagcgtaaaaccgtgaccagcattctgatggcctgggtgtttacccttccggctgcggtactgctttccggcgggctgtactggctctccttgcagttcctgtaatcgtacgcaccaaaacgagcgggtcagctggcccgcttcagattgtgacatagtgcgctttgttcatgccggatgcggcgtgaacgccttatccggcctacaaaaacatgcaaattcaatagattgcagagattatgtaggcctgataagcgtagcgcatcaggcaattttgcgtttgtaatcagtctcgagcgggtcagtttactggcccgctttttttatgcgttattattgctgaagtgcttaatgccaaatcatcaatgcaatcaggctgaccaccaccagaccacacaatgcgctggtcagaataaactgccgacgcacccgctcacagcggcgaataaattcatcatcgtgatgatcgcgataacgttgggcatagatataccaaacgagacgcacctgtttgttgggttggccatgattggtaaaaaagccccctccatcaacatattgatagagcaatggatcgcagttacgcagtaccactaacaacgcgcgtagactactgaaatagcgcgccatgttaacaatgcaaacgacacataaagcccaaaataatgcgacggtgcttatcatacctcctccccggcgacctgcccgcggagttccaccccggggctaccgctcccgatacgctgccaatcagttaacaccaggtcctggagaaaccgcttttgtggtgaccaacatacgagcggctctatagatagtgtaggagatcaggttgttttttttccagaaggttaaccactatcaatatattcatgtcgaaaatttgtttatctaacgagtaagcaaggcggattgacggatcatccgggtcgctgtaaggtaaggatggtcttaacactgaatctttacggctgggttagccccgcgcacgtagttcgcaggacgcgggtgacgtaacggcacaagaaacgctagctggccagtcatcgacaactttatggaaggagtaacactatggcttataaacacattctcatcgcggtcgacctctccccggaaagcaaagttctggtagagaaagcagtctctatggctcgcccctacaatgcgaaagtttctctgatccacgtagatgtaaactactctgacctatacaccgggcttattgatgtgaatctgggtgatatgcagaaacgcatctctgaagagacacatcatgcactgaccgagctttccactaatgcaggctacccaatcactgaaaccctgagcggcagcggcgacctgggccaggttctggtcgatgcaatcaagaaatacgatatggatttggtggtttgtggtcaccaccaggacttctggagcaaactgatgtcttccgcacgtcagctgatcaacaccgttcacgttgatatgctgattgttccgctgcgcgacgaagaagaataatcttccctctacgacgtgttcctgaacgcccgcatatgcgggcgttttgctttttggcgcgccttgttacctgatcagcgtaaacaccttatctggcctacggtctgcgtacgcaatcaaaatccccagccaatacaacatttaacaccatcatattttccatcattagtgtgatcatctggttattttctgttgtaatagtgtattaatctattcaccgcatcaatattaagaatctctgacagatgtaaactttttcgcgcgttatcccttacgcgttcatacttttcaggatggtattggaaggttaataaatatgaatacaacaacacccatggggatgctgcagcaacctcgcccatttttcatgatcttttttgtcgagttatgggagcgattcggctactacggcgtgcagggcgtactggcggttttcttcgttaaacagcttggattcagccaagagcaggcttttgtcacttttggtgcttttgctgcgctggtctatggcctcatttccattggcggctatgtcggcgaccacctgctggggaccaaacgcaccattgttcttggagcacttgtgctggcgattggctacttcatgaccggcatgagcctacttaagcctgacctgattttcatcgccctggggactatcgctgtcggtaacggcctgtttaaagctaacccagccagcttgcttagcaagtgctatccgccgaaagatccgcggcttgatggcgcattcaccctgttctatatgagcatcaacatcggcagcttgatagcgttaagcctggcccctgtgatcgctgatagattcggttatagtgtcacctacaacctgtgcggggcggggttaattatcgcattactggtttacatcgcctgtcgtggaatggtgaaagacattggttctgaacccgacttccggccaatgagcttcagcaaactgttgtacgtgttacttggcagcgtggtgatgatcttcgtatgcgcatggctgatgcacaacgtagaagtcgccaatctggtgctgattgttctctccatcgtcgtcaccatcatcttctttcgtcaggcattcaagctggataaaaccgggcgcaataaaatgtttgtcgcctttgtcctgatgctcgaagcggtggtgttttacattctctacgcccagatgccaacaagcctgaacttctttgccatcaacaacgtgcatcatgaaattctcggtttttccatcaacccggtcagcttccaggcgcttaacccgttctgggtggtactcgccagcccaatactggcaggcatttacacgcatctgggtaacaaaggcaaagacctcagcatgccgatgaaatttactctcggcatgtttatgtgcagtctgggctttttgacggcggcagctgcgggaatgtggtttgcggatgcacaagggctgacaagcccatggtttatcgtgctggtgtacttattccagagcttaggtgaactgtttattagcgcccttggcctggcgatgattgctgccctggtgccgcagcatttgatgggctttattctcgggatgtggttcctgacgcaggctgccgcgttcttgctgggcggctatgtggcaacatttaccgcggtgccggacaacattaccgatccgcttgagacgttgcccgtctataccaacgtgtttggtaagattggtctggtcacgctgggcgttgcagtagtgatgctgttgatggtgccgtggctgaaacgcatgattgcgacgccggaaagccattaattattcttgcagaaagcagggtagcgttatcgctaccctgttttagttttacactggcgtacctgcatagatatcaaagcgatgccctttagtgactaccgcgtttggcgtggcgacattcgccagcggtggcgcgtagtccgggcgctttaccaccacgcgtttggtcgccagcaagcgtgcaggctccagtaatccatcggcatcaagatccggtcccaccaggctctgaaagacacgcatctcttttttcactagcgcgcttttctgcttatgcgggaacatcgggtcgagataaaccacctgcgggcgcggggtaatatcagtcagcgccgtcaggctggaggcgtgaattaactgcaaccgctcctgcaaccagccgccgatttccgcatccgcataaccacgcgccaggccgtcgtcgagtagcgcggcaaccactggattacgctccagcatccgcacgcggcagccgacactagccagtacaaaggcatcgcgcccaagtcctgcagtggcatccaccacatccggcaaataatcgcctttaatgcccaccgctttcgccaccgcctcaccgcgaccaccgccgaatttgcgtcggtgcgccatcgctccgccaacaaaatcaacaaagatgccgccaagttttggctcatcacgcttgcgcaattccagatgttccggcgttaacaccagcgccatcaggttgtcttcatcgtgctccagcccccagcgggccgccagaacagataaggcaccgtctccggtgcctgtttcatcaattaagcagattttcactgaatgatcagcccttaatgccgtaatgctccagcatcgcatccagctgcggttcacgaccacggaagcgtttgaacagatccatcggctcttcactaccgccacggctcagaatgttgtcgaggaagctctgcccggtttcacggttgaaaatgccctcttcctcaaagcggctgaaagcatctgccgccagtacgtcagcccacaggtagctgtagtaacctgcggcataaccaccggcgaaaatatggctgaaagcgtgcgggaaacggccccaggacggggatggcaccacggcaaccagtttcttgatttctgccagagtttcgaggatttttgccccctgatccgggcggaactcggcatgaaggcggaaatcaaacaggccgaactccagctgacgcagaataaacagcgccgcctggtagttcttcgccgccagcattttatccagcaactctttcggcagcggttcgccggtttcatagtgaccagagataaacgccagcgcctccggctcccagcaccagttttccataaactgactcggcagttcgaccgcatcccacggcacaccgctgataccggaaacaccagcggtttcgatgcgggtcagcatatggtgcaggccgtgaccgaactcgtggaagagggtgatcacttcgtcgtgagtgaacagcgccggtttaccatttaccgggcggttgaagttacaagtcaaatacgcgaccggtttttgcaaagaaccatcagctttacgcatctggcctacgcagtcatccatccacgccccgccgcgcttgttttcacgggcatacagatcgaggtagaagctaccgcgcagttcgttattttcgtcatacagttcgaagaaacgtacatccggatgccagacatcaacatctttacgctctttagcggtgatgccgtaaatacgcttaaccacttcaaacaggccgttaaccgctttgttttccgggaagtacggacgcagctgttcgtcactgatgctgtagaggtgctgtttttgtttttcgctgtagtaagcgatatcccacggctgcaactcatcgacgccaaattcggctttggcaaaggcacgcaattgcgccagctctttttcgccttgtggacgcgcgcgttttgccagatcggttaagaaatccagcacctgctgcgggttttctgccattttagtggcaagggatttaaaggcgtagttttcaaagcccagcagttgcgccagttcgtgacgcagcgcgaggatctcttccatcaccttgctgttatcccatttaccggcgtttgggccttgatcggaggcgcgggtgctgtaagcgcgatacatctcttcacgcagagcctggttgtcgcagtaggtcattaccggcaagtagcttgggatatccagcgtcagcaaataaccttccagctctttcgcttcggcctgggcttttgccgcagccagcgcgctttctggcatccccgccagctccgcttcgtcggtaacgagtttggtccagcccattgtcgcatcgaggacgttgttgctgtactggttgcccagttcagaaagacgggtcgcaatttcgccgtaacgctgctgtttctctttcggcagacctatgccagagagttcaaagtcgcgcagtgcgttatcaaccgctttcttctgcgccgtgttcagcgtggcgtaatgatcgccatcgcgcaggtcgcgatacgctttatacagcccttcatgttgccctacccaggtgctgtattcgctcagcagcggcagggtttgttcgtaggcttcacgcagttccgggctatttttcacgctgttcaggtggctgaccggggagaagatacgccccaacacatcgtccacttccgccagcggctggcagagattttcccaggtgtacggtgccccttgcgctactacgcgctccacgttttcgcggcagtcgttcaatgccttagtcacggctggaacgacatgttccgggagaattttagaaaacggaggcaattcaaagggagtcagtaacggattcgtcattcgcgcagtcctggttaaagaggttaaggaagcgctcaacaggcgctttacataatgtgtgtagcatggggttaagtgtagtgaatttcaatgagaaacgttacgctttcgcggcggcggcctcttttcggtatactgtcctgatacgcttttgtgcgccccgaatacgggccgatttttacttaccggaacacctttacccatgctcagttatcgccacagctttcacgctggcaaccacgccgacgtccttaaacataccgttcagagcctgatcatcgagagcctgaaagagaaagataaaccgtttctctatctcgacacccacgcaggggccgggcgttatcagttaggcagcgaacatgccgagcgtaccggcgaatatctcgaaggcatcgcccgtatctggcagcaggacgatttgcccgcagaactggaggcgtacatcaatgtggtaaaacacttcaaccgtagcggtcagttgcgttactaccccggtagcccgttgattgctcgcctgctactgcgtgaacaggacagcctgcaactgaccgaactgcacccgagcgattacccgttgttgcgttctgaatttcagaaagatagccgtgcgcgtgtcgaaaaagccgacggtttccagcagcttaaggccaaactgccgccggtttcccgccgtggtttaatccttatcgacccgccgtatgaaatgaaaactgactatcaagcggtggtcagcgggatagcagaaggttacaaacgtttcgccactggtatttacgcactgtggtatccggtggtgctgcgtcagcaaattaagcgcatgatccacgatctggaagcgaccggtattcgcaaaattctgcaaattgaactggcggtactgccagacagcgatcgccgtggcatgaccgcttccggcatgattgtgattaacccgccgtggaaactggaacaacagatgaataacgtgctgccgtggctgcacagcaaactggttccggcaggcaccgggcacgccaccgtaagctggatcgtgccggagtaattgcagccattgctggcacctattacgtctcgcgctacaatcgcggtaatcaacgataaggacactttgtcatgactaaacactatgattacatcgccatcggcggcggcagcggcggtatcgcctccatcaaccgcgcggctatgtacggccagaaatgtgcgctgattgaagccaaagagctgggcggcacctgcgtaaatgttggctgtgtgccgaaaaaagtgatgtggcacgcggcgcaaatccgtgaagcgatccatatgtacggcccggattatggttttgataccactatcaataaattcaactgggaaacgttgatcgccagccgtaccgcctatatcgaccgtattcatacttcctatgaaaacgtgctcggtaaaaataacgttgatgtaatcaaaggctttgcccgcttcgttgatgccaaaacgctggaggtaaacggcgaaaccatcacggccgatcatattctgatcgccacaggcggtcgtccgagccacccggatattccgggcgtggaatacggtattgattctgatggcttcttcgcccttcctgctttgccagagcgcgtggcggttgttggcgcgggttacatcgccgttgagctggcgggcgtgattaacggcctcggcgcgaaaacgcatctgtttgtgcgtaaacatgcgccgctgcgcagcttcgacccgatgatttccgaaacgctggtcgaagtgatgaacgccgaaggcccgcagctgcacaccaacgccatcccgaaagcggtagtgaaaaataccgatggtagcctgacgctggagctggaagatggtcgcagtgaaacggtggattgcctgatttgggcgattggtcgcgagcctgccaatgacaacatcaacctggaagccgctggcgttaaaactaacgaaaaaggctatatcgtcgtcgataaatatcaaaacaccaatattgaaggtatttacgcggtgggcgataacacgggtgcagtggagctgacaccggtggcagttgcagcgggtcgccgtctctctgaacgcctgtttaataacaagccggatgagcatctggattacagcaacattccgaccgtggtcttcagccatccgccgattggtactgttggtttaacggaaccgcaggcgcgcgagcagtatggcgacgatcaggtgaaagtgtataaatcctctttcaccgcgatgtataccgccgtcaccactcaccgccagccgtgccgcatgaagctggtgtgcgttggaagcgaagagaagattgtcggtattcacggcattggctttggtatggacgaaatgttgcagggcttcgcggtggcgctgaagatgggggcaaccaaaaaagacttcgacaataccgtcgccattcacccaacggcggcagaagagttcgtgacaatgcgttaaatgttaaagggctaagagtagtgtgctcttagcccttaattacgtttccgctatcagttcagaagctgaagcagaaagcggatcagttccagcagcgcaattaacgcccctagaacgatgattgctttatcaatcacccgttttctccatgcgatggagtgagaatgcatccgcttactcatccactgcctgtcacggcgcatgtctcattgttagataagaactctctcactccggccagagcatcagttaacggcaccacccgtacttctgaccaggactttgaaagcgtttatgcgcattgccagagtgaaaatgcctcagagctaactggataatcatacagtacatgcaggttataaaaccagcacgtccttgcaatagtttcagtatggtattagcattgatgcgttagatgatggctatctcactccagtcagagccaccaactcagggctggaaagtaaaaaaccgacgcaaagtcggtttttttacatccggattcggacaaggcttaatatgacgatgacccagtgaaagtatataaatcgtcactgcgatatataccgaagtgctccctccgccagctgaagaaatcgctaattcttgcaatgttagccactggctaatagtattgagctgttagataagaactctctcactccagccagagccaccaactcagggctggaaagtaaaaaaccgacgcaaagtcggtttttttacgtcctgattcagacctcctttcaaatgaatagccaactcaaaattcacacctattaccttcctctgcacttacacattcgttaagtcatatatgtttttgacttatccgcttcgaagagagacactacctgcaacaatcaggagcgcaatatgagttttctgttacccatccaattgttcaaaattcttgctgatgaaacccgtctgggcatcgttttactgctcagcgaactgggagagttatgcgtctgcgatctctgcactgctctcgaccagagccagcccaagatctcccgccacctggcattgctgcgtgaaagcgggctattgctggaccgcaagcaaggtaagtgggttcattaccgcttaagtccgcatattccagcatgggcggcgaaaattattgatgaggcctggcgatgtgaacaggaaaaggttcaggcgattgtccgcaacctggctcgacaaaactgttccggggacagtaagaacatttgcagttaaaaatttagctaaacacatatgaattttcagatgtgttttatccgggaggcattatgttactggcaggcgctatctttgtcctgaccatcgtattggttatctggcagccgaaaggtttaggcatcggctggagtgcaacgctcggcgcagtactggcgttagttacgggcgtggtccatccgggtgatattccggtggtgtggaatatcgtctggaacgcgacggctgcgtttatcgccgtcattatcatcagcctgctgctggatgagtccggcttttttgaatgggcggcgctgcacgtcagtcgctggggtaatggtcgtggtcgcttgctgtttacctggattgtcctgctcggtgctgccgttgccgccctgtttgccaatgatggcgcggcgcttattttgacaccgattgtcatcgccatgctgctggctttagggttcagtaaaggcactacgctggcgttcgtgatggcggccggattcattgccgataccgccagcctgccgcttattgtctccaacctggtgaatatcgtttccgctgatttctttggcctcggctttcgcgaatacgccagcgtgatggtgccggtggatatcgccgcgattgttgccacgctggtgatgttacatctctattttcgcaaagatattccgcagaactacgatatggcgctgctgaaatctcccgcagaagcgatcaaagatcctgctacgttcaaaactggctgggttgttttactgcttctgctggtgggatttttcgtcctggaaccgctcggcattccggtgagcgccattgcagctgtgggcgcgctgatattatttgtcgtcgctaaacgcggtcatgcgattaatacgggtaaagtcctgcgcggtgccccctggcagattgtcatcttcagcctcggcatgtatctggtggtttatggcctgcgcaatgccggattaacggaatatctttctggcgtactcaacgtgctggcggataacggcctgtgggccgcgacgctcggcaccggattcctcaccgccttcctctcttctattatgaacaatatgccgacggtactggttggcgcgttgtccattgatggcagcacggcatctggcgttatcaaagaagcgatggtttatgccaatgtgattggctgcgatttgggaccgaaaattaccccaattggtagcctggctacgctactctggctgcacgtacttagccagaagaatatgactatcagctggggatattacttccgtacagggattatcatgaccctgcctgtgctgtttgtgacgctggctgcgctggcgctacgtctctctttcactttgtaatgagatactgatatgagcaacattaccatttatcacaacccggcctgcggcacgagccgtaatacgctggagatgatccgcaacagcggcacagaaccgactattatccattatctggaaactccgccaacgcgcgatgaactggtcaaactcattgccgatatggggatttccgtacgcgcgctgctgcgtaaaaacgtcgaaccgtatgaggagctgggccttgcggaagataaatttactgacgatcggttaatcgactttatgcttcagcacccgattctgattaatcgcccgattgtggtgacgccgctgggaactcgcctgtgccgccctagtgaagtggtgctggaaattctgccagatgcgcaaaaaggcgcattctccaaggaagatggcgagaaagtggttgatgaagcgggtaagcgcctgaaataaagcggcgatatcccccccacaggttgttagaaaagtgcgctttatttatgtcggatgcgacgctggcgcgtcttatccgacctacaaagttatgaaaattcgatgaatagtatgttatttgtaggcctgacaggcgtagcgcatcaggcgattttgctatttacacagtactccctgcgtgagattccaattatcgcgtccagcatggtgtatcagtgagctgcttagttatcagcgatacagcgcagtagtttaaagacgtactggattatgatttatcagtggtttacacaacaaattattaaataattataagataccttaacccattttattattacacatctaaaacatcacaaaaaaaaatcacttcacacactatcagagaacataataactttttaaaatgagcgcattttgatagttgttaacgatttcctttacgatactatcactaccctttttttacacacaaatattaccgggtggagataaaagggaaatcaaaggtaattatatcaggaagatataacgcattacatttattgtgtgtagaagaaaatccattcctgttctaattatccaatttaaacatcttagcataaaacaaatgatgaataaggaattttatattgattattagcactttataatcattgaataaaaatagattttatgtacttttaaaacaatgcactatattatggggtgatggatattcatgtcacgccccaaaattaactgagttcacctaaacagaaaggatataaacatcagacaggtttacgttactatcaggcatatcacctcagaatcagatgaaaactataaagaaatatctattatggttttaatatttgttgataaggatagtaacatgaacatgacaaaaggtgcactcatcctcagccttagttttttgcttgccgcatgtagtagtattccgcaaaatatcaaaggcaataaccaacctgatattcaaaaaagttttgttgctgttcataaccagccggggttatatgttggtcaacaagcgcgctttggtgggaaggttatcaacgttatcaatggcaaaacggatacgttgttagaaatctctgtattaccgttggatagctatgcgaagcctgatattgaagccaactatcagggccgactgctcgccagacaaagcggcttccttgatccagtgaactatcgtaatcactttgttaccatcctcggcaccattcagggtgaacaacctggctttatcaataaagtcccgtataacttcctggaagtgaatatgcagggcatccaggtgtggcatttgagagaagtggttaataccacctataacctgtgggattacggctatggtgcattctggccggaaccgggctggggtgcgccttactacaccaatgcggtgagtcaggtaacacctgagctggtcaaataacaccaccgaaagatgcagatgctttctcagcatctgcatcatgcattacatcaaattaatacacagtaagctaactattattattataagccctgtcctgttaattacctttggcaaactgattataaagttaatgtccgcaccaggagtcggttatgtttcttataattaccagggatacgatgttcttcaccgcgatgaaaaacattctgagtaaaggtaatgtcgttcatatacagaacgaagaagagatcgacgtaatgttgcatcagaatgccttcgtcattattgatacattaatgaataatgtatttcattctaattttctcactcaaattgaacgattaaaacctgtccatgtcattattttctccccctttaatattaaacgctgcctggggaaagtgccggtgacctttgttccgcggactatcactatcattgattttgtcgcactcatcaatggcagttactgctctgtgcctgaagcggctgtgagtcttagccgcaagcaacatcaggttctgagctgcattgcgaatcaaatgacaacggaagatattctggagaaactgaaaataagcctaaaaacgttctactgccataaacacaatatcatgatgatcctcaatcttaagcggatcaatgagctggtacgccatcagcatattgattatctggtgtgaatttcaggcttacggtgagtctggctacgctgccacacagattagctaatactaacgcctttcacccctgccataccttttaataatcgcaacaggtcttctatgctcgttgtggcatgaagctggatatcaatggcgaccacttcatgatcttcattttcctgcaagctaactaaatcagtttttattttttgctgcttaaaccagtcgagcatacttaccgtattaccgttcactaatgtcagctgtaaatggtaatttttgttcatcaggcggaaggttaattgatggaagacttccagcaccaacaaggtcatcacactaccataaatacccagttcgtacataccgctgccaataaccatacctatggcggcggtcacccagatatccgctgccgtcgtcagacctacaatattttggttacgaacgagaatgttacctgcaccgataaacccgacgcccgtcaccacctgagcagcaatacggctggggtcgagtccgacgtgatctaaagacagcacgtcagcaaaaccatatttgctaacaatcataaacagggcgcttcccatgccaattaatacatgtgtgcgtaaccctgctcctttgccgcgcatttgcctttccatgccaatagcgccacaggcaattgccgcgagtataagacgtataataaattctgctgtcatataaaaatgcaaaaaggagcagcaagatggctcaacttgctactcttttttacttgcacctcattaattcggcaagtcattagatgcttgatttttgaaggtatacaaatttttctgcgggtttttcttacagtattcgatcactttaggaatttgagtgagatcggtttcatttaaagtaacggtatcgccacctttatatactgtttcttcatgcagcatccaccatgcaaccggggtcattgcttttggattcagatcaataaattcctggcaggtcatatctttagcggattcattggctgccaacgcagattgtgcgttcaccagactcaaagccgctacagcgcccataaaaataaacgctttacggagagaactaatattcattttgtaacccattcaatatagagattatatatgaacaggaggaatagctgcttttaaagaagatattccggcctgttcaatatgcaaggaagtacgatgtaacgcattcccggaattacatatctttcttaattttgtcccattcgcctttaactttatctttaaagttggcttgtttatcctgagtacaagcctgaacgatagctggggttacggttgcaataccctgaacatctaaaaccgcatcttctggtttatctttgttgttcagcgcttcagcaaaaccaactgcagttggctggaaggattcgtccacagccaggaaatcttcacaggtccaggagttgaccggttttttgttatcagctgctttttgcgcatccgctgcattgctcacaactggcagaagaagcagaccaccaagaataacgcctaatacttttttcatcgtaatatcctcaactataaagtgaaagagccgtcacgaatcaatttcgacactgaggttataacctggttttctgtatatgtcatgttgatggaaaatatcaaaatcagatatttttatttcaatacaatgagttacagatgcatcagatactgcaattaggaaatttttattaaatcgactgcattcttagacgcgtttttggcatagattgatagcaggggattttcttcttaattttatagggtggttctatgttatatatagataaggcaacaattttgaagtttgatctggagatgcttaaaaaacatcgcagagcaatccagtttattgccgtgctgctgtttatcgtcgggttgctgtgtatcagtttcccgttcgtctctggcgatattttaagcacagtagtgggtgcattattaatctgcagcggtattgcgcttattgtcgggttattcagcaaccgcagtcataatttctggccggtattatccggtttcctcgtcgcagtcgcctatttattgatcggctatttcttcatccgcgcaccggagctgggcatttttgccattgcggcatttattgccggtttgttctgtgttgcaggggttattcgcctgatgagttggtatcgtcagcgtagtatgaaaggcagctggctacagctcgttattggtgtgctggatatcgtcattgcctggatattccttggtgcaacgccgatggtgtctgtaacgctggtttccacactggtgggaattgaactgatatttagcgccgccagcctgttcagcttcgccagtttgttcgttaagcagcaataattaccccggttgtcacccggatcatagtcacttgatgtgactatgatccgattaatactctctccgctacgcagtgttgtagatcaattgcgcactatcattgaaataattacctgctagtgattatttcaacctactgaatttcatctaatttttttcactctatggcaaattagccatttcaaacattatcatggctgatattttccgtagtcaggtttaatgttttaaaagtgctgtgggaaagtgaacaaagagttccgtaagcgttgatgctatgggcggttaaataagtaatccgggttcatttttttgcaactggcgttgattacattgcataaatatccgtgtctccagacgctatataaaaacctgaagacatgaatgcgttatttactcaggtaatttcaatgcgttaaaagaaagctggcaatccaattgccagcttaagtcgaaacaaggagactcgatatttaaatcggattacattttaactttagtaatattcttcagagatcacaaactggttattgataacttattcttgggcagtaatccgcaaacgttaactttttgtttgctatttacaagctgataacaaccaggaatcttacttaggatcaatatatggagtgcgtgatggataaatctgaagtattgattagtgttaatagacgtattagttcacgaagggtaaagttcttataggcgtttactatattgaacaacgattcggacaaggatgtaaataatgaaaaggatgacatattcgaaacgataacggctaaggagcaagttatgatttttctcatgacgaaagattcttttcttttacagggcttttggcagttgaaagataatcacgaaatgataaaaatcaattccctgagtgagatcaaaaaagtaggcaataaacccttcaaggttatcattgatacctatcacaatcatatccttgatgaagaagcgattaaatttctggagaaattagatgccgagagaattattgttttggcaccttatcacatcagtaaactaaaagctaaagcgcctatttattttgttagccgcaaagaaagtatcaaaaatcttcttgagattacttatggtaaacacttgccccataagaatagtcaattatgttttagtcataatcagttcaaaattatgcaactgattctgaaaaataaaaatgaaagcaatatcacgagcacgctcaatattagccaacaaacattaaagattcagaaattcaacattatgtacaagctgaaactaagacgtatgagcgacatcgtcaccctgggtatcacatcttatttttaatcaggacataagcaactgaaattgatggctggcatgacgagggatgcagatgctgatttcattacccccggtgattactaaaggagaggctaaaacgactttattcccctggtatgtgtatccaccagtagaacccttcgttgcccgaatgctggcaggaactgttggcagaacggcaacattttttttgtcgttgacctcaccatgtcgatcactgtgcctgtatcccaccttactggctgacaaccccactatgccgctggtctgtaaatccctcatatctctcctcgcgcgcaatttaaagaaccgttatttctcaagaattttcagggactaaaatgaacagaagaagaaagctgttaataccgttgttattctgcggcgcgatgctcaccgcctgcgatgacaaaagcgcggaaaacgccgccgccatgacgcctgaggtcggtgtcgtcacactctcccccggtagcgtcaatgtgttgagcgaattgcccggtagaaccgttccttatgaagttgccgagatacgtccccaggtgggcggtattatcattaaacgcaactttatcgaaggcgataaagtgaaccagggcgatagcctgtatcagattgatcctgcacctttacaggccgagctaaactccgccaaaggcagcctggcgaaagcgctctctaccgccagcaatgcccgcatcacctttaaccgccaggcaagcttgctgaagaccaactacgttagccgtcaggattacgacaccgcgcgcacccagttgaatgaagcagaagccaatgtcaccgtcgccaaagcggctgttgaacaggcgacgatcaatctgcaatacgcgaatgtcaccagcccgattacgggcgtcagcgggaaaagcagcgtgaccgtcggcgcactcgttaccgctaatcaggcagatagcctggttaccgtacaacgtctggacccgatttatgtcgatctcacgcagagcgtgcaagatttcttacgcatgaaagaagaggtcgccagtgggcaaatcaaacaggttcagggcagtacgccagtacagctcaatctggaaaatggtaaacgctacagccagaccggcacgctgaaattctccgacccgacagtggatgaaaccacgggctccgtgacgttacgggcgattttccccaacccaaatggtgacttgctgcctggcatgtacgtcacggcattagtggatgaaggtagccgccagaatgtattactggtgccgcaggaaggcgtcacccacaacgcccagggtaaagcaacggcgctcattctggataaagacgatgtcgtgcagctacgcgaaattgaagccagcaaagccatcggcgaccagtgggtcgtcacctctggcttgcaggctggcgatcgggtgatcgtttccggtttgcaacgcattcgtccgggtatcaaagcacgagcaatttcctccagccaggaaaacgccagcaccgaaagcaaacaataacgttgcaggcttaaggggactttcatggctaactattttattgatcgcccggtttttgcctgggtacttgccattattatgatgcttgcaggtggtctggcgatcatgaacttaccggttgcgcagtatccgcagattgcgccaccgaccattaccgtcagcgctacctatccaggtgccgatgcgcaaacggtagaagacagcgtcactcaggtgattgagcaaaatatgaatgggcttgatggcctgatgtacatgtctagtaccagtgatgcggcgggcaatgcctctatcactctgaccttcgagactgggacatctcctgatatcgcacaggttcaagtgcaaaataaactgcaactcgctatgcctagtttacctgaagcagtgcagcagcaggggattagcgtcgataagagcagcagtaatatcctgatggtagcggcgtttatttctgataacggcagcctcaaccagtacgatatcgcggactatgtagcgtctaatatcaaagacccgctaagccgtaccgcgggcgttggtagcgtacaactctttggttccgagtatgccatgcgtatctggctggacccgcaaaaactcaataaatataacctggtaccttccgatgttatttcccagattaaggtgcaaaacaaccagatttccggtggtcaactgggtggcatgccacaggcggcagaccagcagctaaacgccagcatcattgtgcagacgcgtctgcaaacgccggaagaatttggcaaaatcctgttgaaagttcagcaagatggtagccaagtgctgctgcgtgatgtcgctcgcgtcgaacttggggcggaagattattccaccgtggcacgctataacggcaaacctgctgccgggatcgccatcaaactggctgccggagcaaacgccctggataccagccgggcagtcaaagaggaactgaaccgcttaagtgcctatttcccggcaagtctgaagacggtttatccttacgacaccacgccgtttatcgaaatttctattcaggaagttttcaaaacactggttgaggctatcatcctagtcttcctggtcatgtatctgtttttgcagaatttccgtgccacaatcatcccgacgattgccgtaccggtggttattctcgggacgtttgcgatcttgagcgcggtcggtttcaccatcaacacgttgactatgttcgggatggtgctggcgatagggttactggtggatgacgccatcgtggtggtggagaacgtcgagcgtgtcattgcggaagataagctaccgccgaaggaagcgacgcataaaagcatggggcagatccaacgtgcgctggtcggtattgccgttgttctttccgcagtgtttatgccgatggcctttatgagcggtgcaaccggggagatctaccgccagttctccatcacgctgatctcctccatgctgcttagtgtatttgtggcaatgagcctgacccctgccctgtgcgccaccattctgaaagccgcgccggaaggcggtcacaaacctaacgccctgttcgcacgcttcaacacgctgtttgaaaaaagtactcaacactataccgatagcacccgcagcctgttgcgttgtaccggtcgctacatggtggtctacctgctgatttgcgccgggatggcggtgctgttcctgcgcacgccgacctctttcttaccagaagaggatcagggggtatttatgaccaccgcgcagttaccttccggtgccaccatggttaacaccacgaaagtgctgcaacaggtgacggattattatctgactaaagagaaagataatgtccagagcgtgtttaccgttggcggctttggcttcagcggtcaggggcaaaacaacggcctggcgtttatcagtctcaagccgtggtctgaacgtgtcggtgaggaaaacagcgttaccgcgatcattcagcgggcaatgattgcgttaagcagtatcaataaagccgtcgtcttcccgttcaacttacccgcggtggctgaactgggtaccgcgagtggttttgatatggaactgctggacaacggtaacctggggcacgaaaaactaacccaggcgcgaaacgagctgttaagtctggcagcgcaaagtccgaatcaggtcaccggggtacgcccgaacggcctggaagatacgccgatgttcaaagtgaacgtcaacgctgcgaaagctgaagcgatgggcgtggcgctgtctgatatcaaccagacaatttccaccgccttcggcagcagctacgtgaacgacttcctcaaccaggggcgggtgaaaaaagtgtatgtccaggcaggcacgccgttccgtatgttgccggataacatcaaccaatggtatgtacgcaacgcctctggcacgatggcaccgctttctgcctacagctctaccgaatggacctatggtagtccgcgactggaacgctacaacggcatcccgagtatggagattttaggtgaagcggcggccgggaaaagtaccggtgacgccatgaaatttatggcagacctggtcgctaaacttccggcaggcgtcggctacagttggaccggactaagctatcaggaagcgttatccagtaatcaggctcctgcgctgtatgcgattagtctggtcgtggtgttcctcgccctcgccgcactctatgagagctggagtattccgttcagcgtgatgttggttgttccgttaggcgtcgttggcgcattactggccaccgatctgcgcggcttaagtaatgacgtctacttccaggttggtttgctgaccaccatcgggctttccgccaaaaacgccatcctgattgtcgaatttgccgttgagatgatgcagaaagaagggaaaacgccgatagaggcaatcatcgaagcggcgcggatgcgtttacgcccaatcctgatgacctctctggcctttattctcggcgtgctgccgctggttatcagtcatggtgccggttctggcgcgcaaaacgcggtaggtaccggcgtgatgggcgggatgtttgccgcaacagtgctggcaatttacttcgttccggtctttttcgttgtagtggaacatctctttgcccgctttaaaaaagcgtaacgtgtaaatgagagtaaggttgaacatgaaggttcagccttactctttcctgctaaccattcaccactcaacaaccagctaaccgtcaggaataccaggcttagtacacagcactgaaagtagaaaccactccagccattcgtcatcaatttgaacaacacaatactgacccacattcccgtaatcgtatgaattgtcagcttaataatcccaaacatgccgagtcttttcctcctgaaaataccgataccgcctggcaaactgcgaaagagaactagccggtagcccggcagaaatcatcagggaagagtttcacatgaagcaggtgtgagatcctgaccaatattcaaatgcgaaatatgtcaggaaaaggtacctgggctatgttgcgcaaactgatgtggcgttacaccataatattgtcgaaatgtgtttataaagtagcttgtactgctatagccacatttttccgcaatagtatgcagaggaatttgacgtaactcgagtaatcgtctggccatgctcatcctggaggcgagtaatattttactgaaacaggtattttcatcctgcaacttttttttgattagactctcgctggtatacattctttccgcgatatcgcgcagataccaacgtttggcgatatcaaagctaataaggcgttcaacttttccactaacagtgctgatgctattgaaaagtaaggggatcagttctttcttatgagaaaacatgcttaaacaggaaaggtagagcatattgctcagtatcggactatttaccccggattcattgaagctatcaaaaatcgccgtcaccagcggcatggggggactctggttaattaacaaacggtctttgctgtgtaaccctaaattgcgtggtagctgacgaatattttgtaagtaatggcaaactgtcagctcatcgatatccagtcgtcgcgtatccggactacaaaacgcaaaatcgtctgccaaatttttctccagcagcagaatactctcgttatgcaggcttattttttgctgttcatgataaatatcgaaactacgacgaatgaggatcacgctgcagacatgagtcatgattatcccttatatttcatactgcgattatttcaatttcagtatactaatgaaatgatgccagactgtttcttagcgcaaaaactgccagatttggtaggaccaaaatttatccacaaagtagttttgcataacagttaattgataataagtaaatgcagcacgaatatattttcgcacagcgtatagcttatgtttataaaaaaatggctgatcttatttccagtaaaagttatatttaacttactgagagcacaaagtttcccgtgccaacagggagtgttataacggtttattagtctggagacggcagactatcctcttcccggtcccctatgccgggttttttttatgtctgagtaaaactttataatcttattccttccgcagaacggtcagtgccgtaaaaattcccttgcgcaacaatacttgccgcgctgtcacggttgctcaatctctgcgcgcttcgctcctgatactctgtgggcgtcatcccataataatttcgaaagacgtaaatgaaatagctcacgctgtgatatccacaggatactgcaactcgcttaatactaaaaccatgtataacaataagttgcaaagcacgttgcattctacactcagtaagcaactgactataacttgtctcttcttcgcgcaattttttctttaacagacttggactcatcaacagctcgctggcgattcgggctagtgtccactcatgggcgatattattattgataaccgtacaaactcgtgttcgcatgttcggttgtaaaacgttcagaagcagcggtataaagtgctcatcctcaagaaaaacagataacaacgcaaagattaatgctcttttacgtagcatttctgcatagcgaagattcttattctggcttagttgcgcaacttcctgaaaaacaggaatatctctactacagtgatgaacgagtaaactagaaacttttttatgtgcatgaagatttaatgcctcctccttgagcatcgggagaaataaactaagcgtgtccctactcacgaatacaaaattttcaacacacttatctactcgaatttggcttgcatccgcaaaaaccaggtcaccgccattaaaatagcgatattcaccattaaccatggtgagaatatatttatgtcttgcatacgcaattagacaattcccatgtagactttgcatagttgacttaatattacataaacatattactgtttattaatgtagcacgccgccctcttaagtcaaattgattgataaataaatttaaacgaagcgggagaacaggatgataatgtgtgatgttctacgggcaggatgactggatttataatacaaaaacgtgtttaagaacacagggaaattaatagtaagcaaataatcccttttcgtgacattaaaggtaatcgctacatttaataaacattcatataacatatatcttatcaacacgatgaatagacagccaatatattattgcgattaataagcaaccgaatgcccagctgtttttttaaaggctgggcattcggtttttacaacgttatgttatcaggtgtgtttaaagctgttctgctgggcaataccctgcagtttcgggtgatcgctgagatatttcagggaggctttgtagtcttccagcaacagttcagcaaagtccatttcgaagccgcgacgacacataatgcgcatcaccacgatgtcggtggcttcaccgccgagagtgaaggccggaacctgccagccgcgcagacgcagacgttcagagaggtcgtacagggtgtatcccggatcttcaccatctttcagtttgaagcaaaccgccgggatgccttcgtccgggcgacccgtacagatgaactcatacggccccagtttggcgatttcatccgccagataagcggcaacctggtaagaggcgttctgtactttggtatagccttcacgaccgaggcgcaggaattcatagtactgtgcaattacctgacccgccgggcgggagaagttgatggcaaaagtaccaatttgaccacccaggtagtcaacgttgaacaccagttcctgcggcagcgcttcttcgtcacgccagataacccagccgcagcccagcggagccagaccgaatttatggccactagcactgatgcttttcacacgcggcaggcggaagtcccagacgatatccggggcgacgaacggtgccaggaagccaccgctggcagcgtcgatgtgcatgtcgatgtcgataccggtgtcggcctggaatttatccagcgcatcgtgcagcggttgtgggaactcatagttaccggtgtaggtcacgccgaaagtcggcaccacgccgatggtgttttcgtcacaggcttcaatcatgcgtttcgggtccataaacaactgaccggggcgcatagggatctcacgcagctccacatcccagtagcgggcgaatttatgccagcagatttgtaccggaccgcacaccaggtttggtttatccgttggtttgcctgcagcttccatacgcttgcgccaacgccatttcatcgccatcccgccgagcatacaggcctcggaagaaccaatggtgttggtgccaacggcctgaccatttttcggcgcaggcgcatgccacagatcggcaaccatatttacgcaacgcaggtcgatggctgcggattgcggatattcttctttgtcgatccagtttttattgatgctcaaatccatcaatttatggacgttttcgtcgtcccaggtctggcagaaagtggccaggttctgacgagcgttgccatcaagatataattcatcattgataatctgaaatgcgacatcatcgcgcatttcgtgcagcggaaatcgtttactctccgcgatagtagaaatggcctttgcgccaaaacgactatcgagtagttcactgcggaaatccgttaacagcttctggtccatttcgaactccttaaatttatttgaaggcaataaaaaagtaggatttatccgcaatggaagcaaggcattacaggcttaatttaaataacaaaatcctaagcagaaaaacgactttttataatataaacatttaacatgataatattaaaaacagactttattatcgtaataaaaatcgcccaaacattgctgttcgggcgatcaaattaattattgtttatcctgcatatacggcgtgtacaccccgttcagactgtgcaggaaagctacgatatcatccacatcctcctgcggcagctctttgcctacctgatagcgcagcatcagtttcaccgccccgtccagcgtcggcacgtcaccgcgatggaagtacggtgccgttaaagcaacgttacgtaaaccgggtactttctgacgcaatttatcacgctcttctttagtcacattcatacgaccaatatccgccgccgtaatttccccaaagttaaagtcttttttcagccccaacggttcaaaggaacgtccgccgagaataataccaccatgacaagttgcacatttattatctttaaataattgatagccttttttctgttgcgccgtcagcgcattttcatctccgcgcaaccatttatcaaatggggaatccggcgtaattaatgttttctcaaattcagcaatggcatcagtaatattttcgccactgaaaccttgcggatagacttcgaggaactgcgttttaagctgcggatctttttccagcttagcaataatttcgtcccaggatttgctcgccatttcaatcgggttcaacggcggtccaccagcctgatcctgcaatgttgccgcacgaccatcccagaactgctcaacgttaaatacactgttaaataccgtcggcgcgttaatcggcccaactgcgccaccaacaccaatgcttgtttttctgccatcgacgccccccgcattcaacgcatggcaatgagcgcaactaatggtgctatcagcgcttaaacggggatcgtgatacagcgcaaaacccaacgccactttttgcgcatcggtaggcagtttttgcgggatgggctgcaccggttcattgcgatgttccggagcagtatcattgctggcgtaatattccgcgcgctgttttgcaatccaggccagtatttccgcccgctcttcatcactcaccttacccgcccagtgtagcgcggtataacgcgttggtggcatagtttcatactgcatcacccattcaatcttattcaaatcgctttggctaacgggtttatcagccagcagtgccgcacgcacggcctcaaggttaaaagatttatatccaagcttaatgtcgtaatccatcaactgtttcgcgccaggaatataataataggcgggtaattctgcgctaggcgtgtggcaatagtcgcatcctttttcgcggagaaagcctaaaaccttattattttcactgacagcagatgcctgaacatcggcctgtttactgcgtttattatcgtggtaccacacataaccagataaccctaaatagcaaatcgcgacgccagccaggccgatcgcggtaatacgactgaccattttcattattcttccctcacggtggtgagttattgtgacccagaaaattttccagaatgctgcaaacgtctctgcgagacaaagccatcataaaaaacagggagatacgctttttgataggaatcaatcaattacatgaatataaactatcaataagatagcctgtgcctattacccagatcaggaatggcatatcatgattgcggcgagagcaggattgaatgttctgaaaatgaaaaacaacaccaaatcggtatttttataaattccattgatattagtgcgttatattttttgacaggttaataaacgtgatccaccgcacgctttgtcgcccaccaggcggagcgaatgactacccttaaagaaaagccgataattagcgacgaatttcggaggttggatccttatgctcaatcagaaaattcaaaaccctaatccagacgaactgatgatcgaagtcgatctctgctatgagctggacccgtatgaattaaaactggatgagatgatcgaggcagaaccggaacccgagatgattgaagggctgcctgcctctgatgcgctgacgcctgccgatcgctatctcgaactgttcgagcatgttcagagcgcgaaaattttccccgacagtaaaacctttcccgactgcgcacctaaaatggacccgctggatatcttaatccgctaccgtaaagtgcgccgtcatcgtgattttgacttgcgcaagtttgttgaaaaccacttctggctgccggaggtctactccagcgagtatgtaagcgacccgcaaaattccctgaaagagcatatcgaccagctgtggccggtgctaacccgcgaaccacaggatcacattccgtggtcttctctgctggcgctgccgcagagttatattgtcccgggcggccgttttagcgaaacctactattgggattcctatttcaccatgctggggctggcggaaagtggtcgggaagatttgctgaaatgcatggccgataacttcgcctggatgatcgaaaactacggtcacatccccaacggcaaccgcacctattatttgagccgcagccaaccaccggtttttgcgctgatggtggagttgtttgaagaagatggtgtacgcggtgcgcgccgctatctcgaccaccttaaaatggaatatgccttctggatggacggtgcagaaagcttaatccctaatcaggcctatcgccatgttgtgcggatgccggacggaagcctgctcaaccgttactgggacgatcgcgacacgccgcgtgacgaatcctggcttgaggacgttgaaaccgcgaaacattctggtcgcccgcccaacgaggtgtaccgcgatttacgcgcgggggcggcctccggttgggattactcttcccgttggctgcgtgatactggtcgtctggcgagcattcgtaccacccagttcatccccatcgatctgaatgccttcctgtttaaactggagagcgccatcgccaacatcagcgcgctgaaaggcgagaaagagacagaagcactgttccgccagaaagccagtgcccgtcgcgatgcggtaaaccgttacctctgggatgatgaaaacggcatctaccgcgattacgactggcgacgcgaacaactggcgctgttttccgctgccgccattgtgccactctatgtcggtatggcgaaccatgaacaggccgatcgtctggcaaacgccgtgcgcagtcggttactgacacctggcgggattctggcaagcgagtacgaaaccggtgaacagtgggataaacccaacggctgggcaccgttacaatggatggcgattcagggatttaaaatgtacggcgatgaccttctgggtgatgaaatcgcgcgaagctggctgaagacggtgaatcagttctatctggaacagcacaaactgatcgaaaaataccatattgccgatggtgttccccgcgaaggcggcggtggcgagtatccgttgcaggatgggtttggctggactaacggtgtggtacgccgtttaattggtttgtacggcgaaccataatatttttacagccagccgctaacttcctgctggctgtaaaattatcctcttcaggaggagatatttaacatcattgccgcctgggtgcgatttttcacttccagacggcgatacagggattccagatgcgcttttaccgttccggtactgatattcagcgctctgccgatctccttattactttcgcccgccgctaacatggttaaaatctcccgctggcgggcgcttaagcttttgagatctttaatgtccttttccggcgtcgtccgccagtctccaggcagaaacatcatccccatcgccgcactatttaccgccaacgcaaatgtctcgacggtactatcacgaggcacaatggccagcacattaaaatggataacttcctgtaaccaccgtttattgcaatccgtcgccgtaattaacaccttaacctcaggaaattgcaccacggttttttgcagcaaccagtagcaaaactcaccatcctgatcgccatcgagcataactaaggcttcagggtaactttccagcttttgccataactcgtctgcctgactggccccctgaatactcactcctggaatacgctgctgtaaactgattttcattccatgaataaatatactctgcctgtcaaacatgactatttgcataactgaatctccacctgaatacgttaaaaagacttaagtagtggaagggtattacccgcgagaaaaaataagaattcgccatttggcggtggccattctacagagatgacgtgtagaaaatagttaccgatataaatagttacagctaaacgcctgaaattacatgtcgagggcactatttaaaacaattttgaggatttccttatattggtggttagtacgcatgcaattaaaaatgaaattccgcgaccacaagccaaaataacaaacggcaaggagacaaaaataagcacaaatagccaacacgtcctctgttcactttaaagggaatcgctgaaaaatacgctctgtttaaggggattcacctttctcagaaagctattccgcccttttcctgctgagaaatcgccacattcggcatgacaacattgtgaaacccggcattagatgttagaaaaaacaataaacaatgcgatatgcgcgttactgtttcgctgtgaacaacaaagcgtcaaagaaatggataaaattcacgcaatgcagttgttcatcaaagtcgcggagctggaaagtttttcccgcgcagcggatttctttgctttgccaaagggaagtgttagccgccagatacaggcactggaacatcaacttggcacccagcttctccagcgcaccacgcgacgggtcaaactcacgccagaaggcatgacctattatcaacgagcaaaagatgtgttgagtaatctcagcgaactggacggtctgtttcaacaggatgccaccagtatcagcggtaaattacgcatcgacatcccgccaggaatcgcgaaaagcctgttactgccgcgcctgagcgaatttctctatctgcatccgggaattgagctggaactgagtagccatgaccgtccggtagatattcttcatgatggttttgattgcgtgatacgcactggcgcgttaccggaagatggcgttatcgcccgtcccctcggcaaactgaccatggtcaactgtgccagtccgcactatctgacgcgctttggttatccgcaaagccccgatgatctgactagtcacgcaatagtgcgttatacaccgcacctgggtgtacatccgttaggttttgaggttgccagcgttaatggcgtccagtggtttaagtctggcggcatgttgacggtaaacagtagcgaaaactatctcaccgccggtcttgccggtctggggattattcagatcccgcgcattgccgtgcgcgaagccctgcgtgccgggcggcttattgaagtattacctggctaccgtgccgagccgctctcccttagcctggtttatccgcagcgtcgggagctttcccggcgtgtaaacctgtttatgcagtggctggctggcgtaatgaaagagtacctggactgaccgactatactttttaagaatgaccacgacagaaggacaaaagagcggatgacgcaggaaaacgagatcaagcgtcccatccaggatctggagcacgagccgattaagccgttggataatagcgagaaaggcagcaaagttagccaggcgctggaaaccgtcaccaccactgccgaaaaagtccaacgccaaccggttattgcgcacctgattcgcgcgacagaacgctttaacgatcggctgggtaaccagtttggtgcggctatcacctatttcagttttttgagcatgataccaattttgatggtgagctttgccgcagggggctttgtgctggcctcccatccgatgttgctacaggatatcttcgacaaaattctgcaaaacatcagcgatccgacgctagccgccacgttgaaaaacaccatcaacaccgccgttcagcagcgtacgactgtagggcttgtcggcctggcggtggcactttattccggcatcaactggatgggtaacctgcgtgaagcgattcgtgcccagagccgcgatgtctgggaacgcagcccgcaagatcaggagaagttctgggtaaaatatctgcgagattttattagcctgattggtttgttgattgcgctgattgtgacgcttagcatcaccagcgttgccggtagcgcgcagcaaatgattattagcgccctgcacctgaacagcattgagtggctgaaaccgacgtggcgattgattggcctggcgatttccatcttcgccaactatctgcttttcttctggatcttctggcggttgccgcgccaccgtccgcgcaaaaaagccctgattcgcggaacatttctggctgctattggttttgaagtgattaaaatcgtgatgacctacaccctgccaagcttgatgaaatccccctctggcgcagcatttggttccgtgctggggctgatggcatttttctacttcttcgcccgtttgacgctgttttgcgcggcgtggattgccaccgccgaatataaagacgacccgcgaatgccggggaaaacgcagccttaaaataggccggatgcggcgtaaacgccttatccggcatacgattttattcggcctggctccccgtaggccggataagatgcgccagcatcgcatccggctataatgcgcacataacctcttgaaactcgtccccagagcctcttcagccatctatttgggagcaaacaatttcattccaactcataaccccagcatataaatccagttggtaacttttatttaacctgaaaccagttttatccactatttataaaattatgtgaagcatttcatagaagaaaaatcactggcctaaacattatcccctttttgcctgatttttgaccatttccgcgatttgttacacattgaaatatcacttttgctgtgcgtaatatggctattcgttagccaaaaaataagaaaagattatgcaagcaacagccacaacactcgaccacgagcaagaatacacgccgatcaacagccgtaataaagtccttgtcgcctctctcattggcacagccattgagttcttcgacttttacatttacgccactgcggccgttattgtgtttccgcatatcttcttcccgcagggcgatcctacggcagcaacgctacagagcctcgccaccttcgccatcgccttcgtcgcgcgccccattggctctgccgtttttggtcattttggcgatcgcgttgggcgtaaagcgacgctggtcgccagcttgctaacgatggggattagcaccgtggtgattggtctgctgccgggctatgccacgattggtattttcgccccgctgctgctggcgctggctcgatttggtcagggtctgggcttaggcggtgaatggggcggcgcggcgctgctggcgactgaaaacgccccaccgcgcaaacgtgcactgtatggctcctttccgcagctgggcgcaccgattggcttcttctttgccaatggcactttcttgctgctttcctggctactgaccgacgagcagtttatgagctggggctggcgtgtgccatttatcttcagcgcggtgctggtcattatcggcctgtatgttcgcgtgagcctgcatgagagcccggtgtttgagaaagtcgctaaagcgaaaaaacaggtgaagatcccgctgggtacgctgctgaccaaacatgttcgcgtaaccgtactgggtacgttcattatgctggcaacctatacgctgttttacatcatgacggtctactctatgacctttagtaccgccgccgcgccagttgggcttggcctgccgcgtaacgaagtgttgtggatgttgatgatggcagttattggttttggcgtgatggtgccagtcgctggattactggctgatgcctttggtcgccgtaaaagcatggtaatcatcaccacgctgatcatcctgttcgcgctgttcgcctttaacccactgctcggttctggcaacccgattctggtttttgccttcctgctgctggggttaagtctgatgggtctgaccttcgggccaatgggtgcgctgttaccagagctgtttccgacagaagtgcgttacaccggagcaagcttctcttacaacgtagcgagcattctcggggcttccgttgcgccatatatcgcagcctggttgcagactaactacgggctaggtgcggtggggttatatctggcggcgatggctggcttgacgttaatcgccctgctgctgacccatgagacgcgacatcagagcttgtaataagagtgaaaagcctgatgcgctacgcttatcaggcctgaatttccatacaatatattgaattcgcaaggatttgtaggccggataaggcgttcacgccgcatccggcatgaacaaagcacactttgccaacaatctaaatctgtttaattgccggatgtcagacatccggcaattatcatcacttcttcatctggctcaaaatcgtccgacactgattagcctccccttcggaaggactgatcagtgccagtaacgccgccgccggtgttaccagcgttgccagtgccgcagcaacagcaccacgggcaatcagcggtccggctttcaccccagcctgcggatttttaaacgtcccccgcacatacagcgggctacgcagtgtgataatccgaattcctttactctccggatcaatagtcaaatccagctgttcgctagcaaaacttgccgtgccggtaacattaatcaacgcgttctcagtatcgaaagcaaaaatctgcgggcgcgccacgccgttggcaatattcagattcgccgccgcgcagttcacccgcacctcatcatcaccaaatatcgcaccgacaatgtagttgccgacattcagcccaacaatctccatcaggttgcggctcaccagcccgtcattcatcaacagtttcaggttgccgttactgttgcctaaaagtgccgccacgctgttaccgctaccgcgtagttccgcgtcaccgttcatttcccccagcgtcttctgcatcagttccacatcgggcatcagttctttcagtttcagtcgacgagcctgaatatctgcccgcccctgcatcggctttttatcgccttccagatgaatattcgccgcaatgctgccgcccgccatgccaaatttcagcggttgcaggcgcaggtcagcatttttgaggatgatatgagtagaaagatcgctaatcggcaggctactgccatgctcaatgcgccgccctttgaagcgaacatcggcatccataacgtcccatttatcggtttcgaagcggtcataaggcagcactttgcccgcaggctgaacgcttttttcgcccttcttctgttcagaccgtttgctcttttctgcccctttcccggaatcaacgccaatcaacggtcccaggtccgccagccgcaattgccggctctcgacatcaccttccagttttggtcgtggctttccggtggtgtagaccagagaaccgtggatatcgctatcaccaattcgcccattaaaaccgcgataatcaaagacgctgcttttttcagtgtcgattttcgctaccagccgaccatccgtttcaaacggcggggtatcgggcagcagaacgcccgtcagttcatagagatcacccagactatcgccagaaaatttaagccgtaaatcgacaccgcccatcttcattgggtcattcacgacgccatcaaaagcaacacgggtgttaccagagcggaaatcagcctgtaccggaaacggcgtcccttcgccacgcagcgccagcataccgcctatttttcccgtacccgtgagcggttcaccgttatatcgtccctgcgccttcaggccaaaaacgtaatcgcccaccttttctttatccgctttacctttgcttccagtaacttcgctgaacggcagcggcttgcctaagggatcaacaaaaatctccagatccgctttgcttactttgtcatcaatggcgatccgcccttgatcgaaaagaatattatccagccgaaagctccatgcgctcggctttgcattcgcgtctttgttatcatcgttggcaagattaaacgtccagttattgttcttttcagagaggcgaatcaggcgcgcgtcgggcttttcgagcttgatccacggcagccagaccgttttggtcagcagcgccagcggggccagcgttgcctctacgcgtggcaaatgcaccatcgtgacttcgggaatatccggtggattgccaagaatgatgtcttccgcgtgtacatggggccacggcacccagctgcgccagccagtttcttgtttttgccgctcccacaccacgcccagatcgccacggatagcgaacggacgattcaactccgcagagactttctggttgatagtcggtttgagtcgattccagtcaaaagttgcaatcaaaatgatcgccacgacaatcaacaacaagaaagccccactaatcgcagcggttattttgcctgccttgctcatcgttcgcttcctcatattcttcctgtgccagtcctaaagatagtccagccaggcggaaaatgaggcagcttatagcgccagaaccgccgtattcagcgtttctatcggtgccgggcgactaagaaaccagccttgtgcggcgaatgcggggctgttctgaacatcacgccactcttccggcgtttctacgccctcgacaatcaccccgcgacaatagcgattcattagatgtaaaagctgagaaaagagtgtgcgtccttccgggctctgacgcagcatcacaaacagttctcgcgcgattttgatgtagtcataacgcacttcacttagcgcagagaaatttgccatcccggtaccaaaatcatccagccacagcgggccaaattcacacatgctggcaaaggtactatctttcggcagacggatatgctccaccagttcgaaacgcagccagggaagacgctcaatctggcgcaggatttttggttgctgacgcagggcgatgagcgtagggccatcaatattgacgcttgccagcaggccgtgctctataaagaagtcggctttttgcgccagcaaatcaatctgctctttcacaacctccatccgatggctgacggtgatttcagtaaaatagcgatccggcggcaggcgttggctagggttcaagggatgcgtgaccaccgttaatagctccacggccattaaccgcccgcatgtttgatagatcggctgccaggtgtaagcacgctcacactgcaaccaaaaacgccgttcctgcaagctctcgatgcttgcttcagggttgcttattcgctggataacctgccttatcatcaaagatgtcctgtgtttaaaagtgatgctgcccggactcgacaaagattatcggcgcgtaagggcagaactttaccgcctggccggggtaaatttcctcactccacaacggaatctttcaggaatacgttctggctcaaaaaaataatggaacactgttttaatatggttgaccagcaaaccaccacagcgcaaactaacgctaattttttacagatcaggttcacgactatgtccaaaaagattgccgtgattggcgaatgcatgattgagctttccgagaaaggcgcggacgttaagcgcggtttcggcggcgataccctgaacacttccgtctatatcgcccgtcaggtcgatcctgcggcattaaccgttcattacgtaacggcgctgggaacggacagttttagccagcagatgctggacgcctggcacggcgagaacgttgatacttccctgacccaacggatggaaaaccgtctgccgggcctttactacattgaaaccgacagcaccggcgagcgtacgttctactactggcggaacgaagccgccgccaaattctggctggagagtgagcagtctgcggcgatttgcgaagagctggcgaatttcgattatctctacctgagcgggattagcctggcgatcttaagcccgaccagccgcgaaaagctgctttccctgctgcgcgaatgccgcgccaacggcggaaaagtgattttcgacaataactatcgtccgcgcctgtgggccagcaaagaagagacacagcaggtgtaccaacaaatgctggaatgcacggatatcgccttcctgacgctggacgacgaagacgcgctgtggggtcaacagccggtggaagacgtcattgcgcgcacccataacgcgggcgtgaaagaagtggtggtgaaacgcggggcggattcttgcctggtgtccattgctggcgaagggttagtggatgttccggcggtgaaactgccgaaagaaaaagtgatcgataccaccgcagctggcgactctttcagtgccggttatctggcggtacgtctgacaggcggcagcgcggaagccgcggcgaaacgtgggcacctgaccgcaagtaccgttattcagtatcgcggcgcgattatcccgcgtgaggcgatgccagcgtaaacgcagcatatgcaaaaggctggataaagtgttacccctctatccagctcatccataaatacctgatggttgtgctaactcatcaccatcaggcattactgtgcaggtggaatatccgtcacttcaggatgtacgtcatccgtggcgacagaggtggtcgcagcggcggtagatggggccatgatttgatcccagaccgcctgcaacgctttcatgttaaattccggctcgcctttcggctgcagcagtattaacgccatatcattgctcaactgttgacgcagatcctgatttaacatctctaccgtcaggctattaaggaaatcctgccgcagtttctgatattgctccggcgcgatatcgacaacctgattttgcaagctacgcatccgctgacccatcagaatatcggtatcagctcgtgcataggcggcaaacagtttctgcagctccagtttcttttgcgccactaacgcattgaactcttcttccggcagacctttatcgcgaaccttcgccagttcacgcgccaccagattaaggttgctgttcagcttgtcgtttggactttcgatgttgatggcacactgcgcacgcagatacagcacacggcagtcaaatccaagaccgatgtctttgctgttactggcacttaacgcttgctgaacatgccagaacagcgcctcgcgggccaggtccgcacgccagtagcgcagcagtgcggcactttcacgaatcggctgccacggcgtatcccacatgatagataaccggtcctgacgcaccgcgtcagtcataatactcaccgcttccgcacgcagcggagaaagcgtcggcaccggagctggcgtttcacgtttgcctttcagttcgccaaacgttttgtttatttggtcgacaacgctgcgcgcatccacgtttcccaccaccagtagcgtcattgcatccggggtgtaccatttctgatagaaatctttaattttttccgcttcaacgggttgtttcagcggatcggcaggatcgtgacctaacaaggtactccctttcagacgatagcgccaccagccctctttagtatcggcaggccaggttgccaccatgtcctgactttgcagcgcgtggttgatggtttctggtgtgatggtcaatttgccagtggcatttgccagataagagagcgcttctttcagcaaatcgttacggttattgggcaaactcagattaaacagcgtggtgtcataagagacaattaccggcggcatcgggcgtttagggtcgatcccctgctgccacaaactacgcgcctgtgctgcgtcaaggccaccgctttgcgttagcgcaatacgagggatggcgtgactgtaaccgctctgttgtgtactttcggcgaggctaccggtattaaccagcaggcgaatttcaacacgatcgctgggacgctggggggtggtcagcacttgccactgtaaaccgttggaaagcgtcccctgttgccatgctggatcaggctggagcgcatctgcctgcacatagccagcagtggccatcatcagcaaaccgcccgctaaaagtcgaatttttgtgccctgcatgtgaacccctgatcaactatcctggtaataaaaaaactgcccgttgtcggtcagtctaaatgacgttaaaaacacttcgtgttagaccgcaagaacatgaaaatgtcacggaagaagtgaaataaacctgaactcacccaggtggtaagttcaggcacaggggtcaattatgcgcaaacacccgcactcggggaagggagtgcgggcataagtgatgagattaagaggataattcgtgcgttttgccatccggcgcacgattattcagcacatcgtccagttttttgtggtccagttctttcacccacttagcaacgacaatggtcgctacgccgttaccgaccaggttagtcagcgcacgagcttcactcataaagcggtcgataccgaggatcagcgccagacccgctaccggcaaatggcccaccgcagagagcgtcgccgccagcacgataaagccactacccgttacccctgccgcccctttagaagaaagcagcaacacgattaacagcgtgatttggtggacgatatccatctgactgttagtggcctgggcgataaacaccgccgccattgtcaggtatatgcttgtgccatcaaggttaaagctgtagcctgtcgggatgaccagccccaccacgcttttacggcagccgagtttctccatcttgtcgagcatacgcggcagcgcgctctcggaagaactagtccccagtacaatcagcagttcttcacggatgtagcggataaatttgaagatactgaaaccagtcgctttagcgatactacccaataccagcaccacaaacaggatacaggtaatgtagaaacagataatcagctgccccagttgcaccagtgtgccgacgccgtatttaccgatggtaaacgccattgccccgaacgcaccaataggtgccagacgcatgatcatattgatgatgccgaagatgacctggctgaaactttcgatgacgttaaaaatcagttggcctttgctgcccagacggtggagcgcaaaaccaaacagtacggcaaacagcagcacctgcagaatgttaccgctggcaaatgcgccaatgacgctcgccgggatgacatccataatgaaggcgacaatgccctggtctttcgcctgatcggcgtaaaccgctaccgctttcgcatcaagcgttgccggatcgacgttcattccggcaccaggctgcacgacgttaacgatgataagaccaataatcagcgcgatggtactgacaatttcaaagtaaagcagtgcgactgcgccggtacgaccgaccgccttcatgctttccatgcccgcaatgcccgttacgacggtacaaaagatgacaggagcgatgatcatcttaatgagcttaacgaagccgtcgccaagcggtttcatttgctcgcctatttcaggatagaaatggccaaggagaataccaatggctatcgctgtcaggacctgaaagtaaaggcttttaaacagagaggttttcatagggtgtcctttagtaaaaccacaggtcttgtaaggttatggggtacctgcggccttaaaataacacccagacaacatcacagaaatgtacctggatcataattgaaacaaaaaggttaaaaagtttgagctggctcgcacaaaccagcactttttaaagttttgtaatcagtttggggtagttacttttcttccaggtaactctcttcgaagatttcaatagggagtgggcgagcaaaaaggaagccctgggcaataccaacgcccgcttttgccagccagtcgcgttgtgcttcagtctccacgccttcggcaatcatttgtaagttcaggctctgcgccagcatgataattgcagcaatcatgctgctatctcccggcaagccttcaacaaacattttgtcgattttcagtacgtcgattggcaagcttttcatatgctgcagctgacgcagccctgcgtagcccatgccgaaatcatccagcgccacccgaactccggcattgcgcagcggacggaggattgccaccgcagcatgagggtcgtcaatacgtcggctttctgtcacttccagaatcagtgttcccggctgaatgcgatagcgggttaacagttccagcatatccgccaccatattcgggtgcatcagttgcagcgcagagaggtttacgctcaagggcagcataatgccgcgctcttgccaggctgcaagcaatcgacaggactcttccagcacccagtgaccgacggtaaccatcagcccacagcactcaatgcgatcgattaagccatccggcaggtcccaactgccatccggttactggatacgcagtaacacttccgcactgaccagtttaccgctggtcatctcgacctgtggctgtaaccaaatagcaaactgatgattttccagtgcattaaggatatcgctctcttccgtcaaccgcttctgggcggcttccatctgctgcggatcaaagaactgaatctgattcttgcctttatggcgagcggtaaatgccgcagaaatagcgcgactgtaaagctgttcggcggtgagatcgccgtagaacatcgccacgccaatgctacagtgcggacggagttgaatacgttcaatcggcaggcgctcgctcatgatagtgagcacttgctgacctaaggtgattgcgtgccacggttcctgtacaccgttggcaatgacagcaaagtcataaccgctaatctgcgcgaggatcatacgtgggctcagtacgcttttgagtttttccaccagcgtcagcagcagaatttctcgttgcgcctctttcagcacgcccgcagtatcacgcagggtttcacaggtgatgatcatcagcgcggtggtttgtttacgcgcgacaacctgctccagcatctccatcagcaaggctttgttcggcaaatcgctcaccgggaagcgcatcgcattttcgttctgttcttcataatggcgctgcagcaattgctggttgaggttgtaactgcgcaccaacataccgatttcatcgtcctgatgcagacgcggtaatgccagttggtgaccaacaagctccttggctgggatggcgttaagttcgcgagcaatattgcgtaacggatgcaaaatcaggcggttaatgcaccagctgatggcgacggtcaggataaggctcaaaagtaagtaaatggtcactaacgtactgagggtgctcatcacgaacttatacatacggaaggaatccgcctgtagtaccagataggcaattggctgcgggtttgccggacgttcgaggctgtaaacgcccaggctgatttgaaccggtagctcaaacaggcgagtaaccattaccggcaccgggcgctctggaataaaacttttacgcagcgcctggaactggttaggcagcactacatcggcacggctgaccacgcctgccggtttaatgctggcaagaatagcttccgcttcgggaatatcgcctttcaaaatagcactagataagggttcgcggacagagcgagcaatgctttccagttgcgtagccgtgttatagcgattctgctggaccagatggaacagcaaaacggtgcaaaaaataaaaacgaacaccaggacaacggctgccaccattgccatctgcttgattgttaacgagcgacttacgcgcaaattgtctccccccggaaatcccagattgccgcccgagtatacccgatcgcagcggcattaagagaggcgctatctgaaaacttaccagtcggcgtaaggtatcagcggctgcggcggtaaatccatgtcaccctgccatccggcggcggaataacgtacgtagagcaggaaatggctgggtgcgtaatctttcgcctgctggatatcaattgccgtgccaacaaaccagttggaagtaacacgtcgttcaagtaatgcccgcgccgtgtagccgaagccctgactgctgccgccatcgttggattgccgcgcagcttcttcctgccagtcggtcgggatcagattcatcagcggataacgcggcatggttttggtgcgactatggctccagctgccagacgcacccagctcccagctccagttttccgtgcgctcccgccacatcaccggtatggcaaagctcaggtattcctgcggactgtagtaaccgccctgaccgagactgtagccactcagatctttgtcgtaatgccagatcatgttgttcaggccgattgtgacgcggcgattgttctggttaatgaccttatagtaatagcccgtcatccagcgcacgcgccagttatcttcgacatttttaccggttaactggtcgccactaaggcttgcccagacgccgtttgcttcacctttatcgtagctcagacttagccccacaccgtcggcacgtacgccaccccattttttcccggtattgctcggggagtctttttgcccaccaaaggccagcaaagaactggagatgggccgacggtgggcgttaacggtgtaacccagcggcccgatatcatcgctgtaactgatgccgccgaccacatccaccacgttgaagcccatcggcgtggtaccgatatcccagctccagacgtcatttcgccagccgaccgccacgctggcaccggaatcgctctggctgcggttgccgctacagtcctgtaatgtacaggtgccccagttgtcatcccatttgccatcggcattagtggagaaactgccgacgttcatattgacgaaatcactgcgaaagaacatccgcccgtcagaatacggcgcatccacctgcaacatggtagtgtgcgctttcagatcggagtaaccaccggtgccgctgctaccccagtaatcgtgctcaagggtgacgttaagatcctgctggcgatagaggtccgccgcatcgctgcgcacgccacgtttcagccagtcatctttctcgtcgttacgggtcagtcgggtaaaggtgtcgttatcctgcggacgcgtcgtagtcacaccggatgcgaccatggcgtctttgtaggtttccagcgcctgcgttggatcgcccgcctgcgcttcaaacttcgcaccatcacgcagcaccatcgcgctttccatgctcggtggctgagattttgcctgcgggatcaacttattaaacgtccgctgcgctgctgcggtatcgccaagctgcgcctgtgccagcgccacgcgccgctgtgtgttcaggctggcgttatcggtagcgggcagtttcgccagctggctacgtgccgccgctttgtcaccggcagcaatatccacttccgtcagaccaagaatggcgtcggcgttagctggctcccgcgtcaggacattctgatatgcagcgcgggcggcggtgtaatcacgtcgttgttgcgcccagtcagccagcgtgaggtcaatacgcgtggaaggtggttgctggcgcagcatcgcttccgcttctgcctctttgccgctttctcgcaggcggttagcggtttccagcacctgatcgctttgcagtcgattaaccagctcctgaatattgctgttccactgcgcacgcggcaggctattgatatgcgccagcgccgctctgtcctggtcatgaccagagaggtacagcccgtaagcgtaaacctgctccgggtcgttgctcttctgctgcgccagattgcgcattaacgtatcggcctggctgcgttgtccggcctgccagagatcctggctaagtcggtaagtaatccatacgctgccggggtccagcgccagtcgttgccgctgaagtgctgccgcctgcgcccatttgccctggttttccagtgcctctgcctgctgtgccagacggtcgttttgcaggctgcgttcgatatcatcaatgctacgccgctgactggcagagaggctggcgataaacgcttcagctttttctgggctttgctggcggtaaatatttgccagcccgcgcacggcgttagtgttgccgctgtccatacgcaaggtctgctgataataacgttcggcggcgggataatcttttcgcgccatcgccacatcgcccagccccagcactgcataactgtcggtgttatcgacattacgcgcctgctggaacaggcgttctgcccggtcaggattattggctttcagcgcagcatcgccctgctggatcgccagccagtagcggtttactttcagcagactgttccatttgtcgttgttgctgctgtgcgggtccagtgcgagggctttttccagattcgccactgcattggcgcgatcgcctttctgagaatacgcctggcccagcgcccccagagcttcactgtctttcgggttcgcccgcaccgcctgttgtagttcgggaatggctttacccgccataccagagtccaccgccgctaaaccttgcgcacgagcgcggaaagcaggatcggccagctgtttttgctgttctgccagttggctttgcgcagccgccacgctatcgccatcactaaagatgctgagatattttttcagcgcgctcacactggcatcactgacgggcatgtctttaatctgcccgtaccagattttagaggccccttcgcgcccggcgttgctttttgccatctgttccaggacggcaaaaccttcgtcacggcgatcgctactaaacagcaatagcgccagattgttttgcaggcccgtattgcccggtgcatccgcattgatgcgttttaactgattaatcgcttcgccacggcgagccggaattttcgccaccgtactccagtactcgacagcaatgtcaccttccggcggcgcaccgttgaacagtttgttgtaactcgccacagcttcttctgcatgaccggtcgtcgcctgcaatcgtgcctgttgcagtgcctgacgaccatccggcgtggaaagtagcatcgtagtccggctgcttttatacgcattactactcggcgctaactggctcagccgatcgagctgtttttgcgcgccatcaatatcgccctgacgtaacaaagaacggaaacgggcggcaacgacgtccgggttattcggatcaataagttccagccgatataagctctgttgcaccagatcttcacgatgggtcgcttcgcctaaccgaacttgctccagcaactgttgctgagcggttggtgctgcctcgaccatcggcatgacggccagaccgagggaaagcgtgaatatgtttagtgtgaatttgcgcattcctggccccagtcaggtaattactttagtgactatttgcgcattcctggccccagtcaggtaataactcaccttttgtgctgaagcggaaacggtgttgatcccagccttgtccaaacagggtcagcacatagttgtaataggcatcgctgccgggaaagttatcggccacgcgctggcgctgaacggcctgcgcatcgcggttttgtaaaaagggcagcatggcggcagaaaaaccgactggtcctttaccctgcgctttccccgtagccacatccactttttccggcggataaccgtttttctcagtgaatgtcgccatcggtttaaaccggttgagcatccgcgctttttgcggatcgctgtcaggcatcatgcctacccacatgtaaacgcggatagcgtcgtagctgctgatcaatgttttttcggcttttagctgccagcctttgtctttctcatagcgcacccagtctgggctaaaacctttcggggcggtttccagcaataaacgttgattggtttcgcgcagcgtggtccacggcgcgccaaagcgggtgaaatactgcgccagcgtcggcggcaggtagctggggttaaaacgccagctgttatcctcagcaaaacccactttgcccggtaacaacatggaacccagcccaggcaccgtcaccacttcctcccgcgcgatacgttttagcaacgcgctgccgatgtcggtataacgctgctctttccacaaacgccccgcctccagcaagctccaggccatccagacatcaccatcggaggcgctattgctgtccagcacttcccacttactgttctctttcttgccccacagccaggcgggcaaacgttcttttaaagaaccctgagcgagattgttctgcgtccagtcgagaatattatcgaaagctgcacggtcgttagccgccagggcagagaacatgccgtaactttgcccttcggaggtggtgattttgcgcgcgtcgctggggtcgatgacgcgcccttcctgactgatgtaatcctttttaaactgctcccaggcaggccaggtacaggctgcctgaacactaaaggcagccagcagcagcatcgtcacgattccactacgcaacacattcatcttcaattactcgttatccgggttaagacgacgacgactaataattcgcagcagacgccacagtacccatgccagcaatatcacactgatagccgccagcaccgccagcagaatcggatggtttgccagcgcataccacacgcgctcgaaccacggcagatgacctacgtaataaacgtcgccaacacgtaggctgttgataccggactcgcggatcaccgcgacgctaccgaacatggtggcgcgtttgccgctatcgttcaccgcatcgttaagcatttcataaccgcgtgggctatctgccaacagcgcaatcacgctgcgctggtcgttatacgggctctggaagccaatcaccgccgccatcgcaccggaagaggtcagcgtactccgggtttctgccgcgcgatcgctctcgtccggcacaatgccggggaacggggtctggcgcatcggtgttttcacccagctttcggtcgcctgcaccaataggtcgatctgcttatcgtctttcagtttgtccgggataccaccgatgatcatgatgtcggcatctttgccctgaatggtgctgccatcatcggtcaccgtcagattaatcgccgggaagcccgtctgtgcgccgataaaaccaacagtattcagcaacgtttccatctgtgcttcgttaggcgctttcggcatcacggtgatggtttggctcagatccgccatccggctgaatgggaagcccgcgttagcaaaggcgcgtagatccggcatcgggatgaagtggtaatacttgctgaagtcgatggtggagtcgtcaccaatcaccacatgattctgcaccggctggaaggtaatacagttatccacgctaccgcccggcatcgggttcatatactcaaagtcgaagcgcagctggttggtcgcgcccagtttcagcgccggaatagagacatctgttttgccatccagcaaaccttgtaataccggaatccgcagcagcaggcggttcgcctcctgtttgctgctcaggttgaaggattgcaggaactggttattcaggctgatatccatccggctactgtctttcaccggcggcatggtgtagcggtaattaatatccatatcaatgccggtactgcgcatcaggtagagatccggcggcaggtttaggctaacgttaatcgctgctggctcaagaccgctggattgtaactgttcttcataggttttcagttcgccaaatgtgaccggacgatcggtacgtacccagttcggcgcatcgtacggcttacgcggtagcagcggtttcacttcattcactaccacgctttcaccacggaacagaatgttaccctgagcgatacctttcgctgcctgcaacaggtctttgtcgtcacgaccaaacaccaccagcagtttgacgtaaggattctgcggatggttaatcatctcaatcaccggggcttttaccgccggatgatcgcgcaggaagtccggccgtttgtcgttggttgcaaagacaatggcattgcgatccggcagttggttatagagtaccgggaagttctgcccacgccagccagaacggctaccaaaccagctggcgacaatggcagaggcttgttgcagcccaacatccggcgcacccgcaaagaccatcggcaaggtgttggtgcggttatcgctcgggtcaaagaatggcaccgggaagtgactcaggtcattcttcacattcagggtctgataggtcagatccagtccactgctccgcccaacatccagccaaagcgtggtgctggccggtttttcgcacacgtcctgataatggccgacaaactccagccgtacacggttgaagtcgctaataaacagtgggttaatgggcatttgcgccagcgtttttttacccaactgttctttggtcactggcagcacgcccatcagttcatcattgagataaacctttaactggctctggacaggcagtaagcttgggcttggggtgtattcgaagttgagcatcgccttcgtcaccacttcatcgctgcgcataccaaactcaatgctgccgttcgggttaatgccacgtagcaccatgctgcccggcggcggtgcaatttgcgcaaaggtcagcttcacatcacggctaggaccgttctgcgccacgactggcgcatcagcgccctgcacgcccggcatcacttgccccacctgcggattttgttccgtctgggcggctacagctggctcagcattgatcagtggttgcgttgctggcgtcgcctgcgtcatgaaagaggggaacgcactcatccccatagccactgcacaaatccagaatagttttcttttcatcgcgttatcatcattgttgagccaaagcctgatcgcttggttgtgccgtttcgctccgctccgggcggcgcggaataaagcttacaacccaggaaaccagagaagtcagcacacggaatatgcccttcacgctagaaggcgcaaactccgccagatggcggtagccacggaagccgagcttcagaatatccagcagactttccagcggcttatcttccgggtagctgtcctgccagagcgcccatgtatccgcacgggcaaacgtacactgcacaaaatcgatatgttgctgggtggtgagcggcattaatttcagcccaacttcattacccatcacgcgcgccacctgggtcgggaagacgtattcctgctgaccgcgtttaagcaacagattcactttctgcccttccagaatctgcgcctgaccgttgatcttgatccccaaaccaccgtcggagaaatcctgaacggtacagctgaagaggtgaccatcttcgcgggcaattgccgcgggcatcgtcatctccacgcggtggcttcggcgtacctgtttgctttctacgcttaccgcaactgcgccgccaagaacaatcaggttgtagaacacccacaccatactgacgaccacggtgagcatctcggttggcgggccatagaagtagcgccagatgcctaccgcaacgcccaccaggttgagcaggacaaggaagatgtagggccggctgatcacccagtcgacgtactcttcttccaccagtccacctttggcggtgacgttaaatttgcctttgtgcgggttaatcagcgccaccagcgtcggtggtgcgatataccacgccagcaccgtttcgtagatttcactccagaaagagtggcgatatttgccctggatcttggagttggtcaggctggcatggatcatatgcggcagcacgaatagggcgatcatcaacgctggcgcatagatgatgtaggcatgaagcagcaggaacgccagcggcgcagtcaggaagatcagccgtggaatgccgctcaagaagtggaacatggcgttgacgtaacatagccgctgagcaaacttcagccctttaccggtgagcgggttatcgagacggaagatttgtaccatcccgcgcgcccagcgaatacgctgaccgatatgcgcgctcagactttcggtcgccagccccgccgcctgcggaatacgcatatacgcggaggtatagccacgacggtgcaaccgcagagaagtatgcgcatcttcagtcacggtttcgacagcaatgccgccaatttcatccagcggcttacgacgaatcaccgcacaggaaccgcagaagaaagtggcgtcccacatatcgttgccatcctgcaccagaccatagaacagcgtgccttcgttcggcgttttacggaaacgccccaggttgcgttcaaacgggtccggactgaagaagtggtgcggcgtctgcatcatcgccagctgtttttctttcaggaaccagcccatggtcatttgcaagaagcttcgcgttggtacgtggtcgcagtcgaaaatgctcacgaactcgcctttggcatatttcagcgcattgttgatgttgcctgctttcgcatgttcatgagtggtgcgggcgatatatttcacccccacgttttgcgcaaactggcgaaactcttccctgccgccgtcatcaaggatccagatattcagcttatctttcggccagtcgatacccaggctggcgtaaatggtatttttcaccacgttgagatcttcgttgtaagtcgggacaaagatatccacgctcggccacaggctcatatctttcggcaatggcaccggctgacgattcagcggccatactacctggaagtagccgagcaccagcacaatccacgcgtacgtttcagcgaagagcagaataagcccgcacaccaggctgaccggatcgtcccagttcagcgtagaggtgtaacgccaccagatataacggcaagaaacggtcaggctcagcacaatcaacattagcgcgctgaagcgccccggcatccgccgtacgatcagcgctaccccccacagcagcatcaggaagataaactgcgccagcgggttaaacggctgagtaacgcagattaacgccagaatcaggctgaaggtgacgatgataccgaggatcaaccgccgcgccccggcactcaaatgaccgagctcttttttctcatccagatgctgtgttttatggctaacgcgctcaggcagctcgttcatccattgatggtaacgtccacgaatattttgcagaccactaaatgcccgcctgcgcggtttcggcgtttctttgcggcttgcaccgatcaataaccagcatgtttgaatgagataacggaccgggtccagcggacgcggacggctggcgttgatatgcggatacaggtttttatgttctgcgcgaatacgctgccagcgcgggtgctccagcggaataaaaatccaggccaggatcatccagaaacagccgagcgtcgcgctgaaagcgctcgcaccgtgacgacgataatcgcgataacgcccgataagccgcgcgttgaccggcgggataagcaaccaccgggtcaggatactcatgatgcactcccgactggcgtttacatcaacttgcactcccgactggcgttttcagcccggagtagttcaacaggcaccagttcgccagcgtcagtatctcttcagccgccagcgcatcactgcgatattcacctactggttgcttagccgccaggcattcagccatcgcttcatcacgatgaatgagcatcggcagtaatcggcgctggctttgcaaccaaagctggtaaatatcgtcctgaacctgactgccaatacggaagtcattaatcaaaatatgtgcgccatccggcagcgcttgctgatgcagtcggatatggcagttggcatccacattgacgattgccaggctgtgatcgcacaaactcagcagctggtgggttatctggctggcatcacgcggtaagtcgattaaaatccactggtaacgcccgctggcttttagttgctgtaagccggagcaaatatcgctcagccgggtttgccagtgctgtggattttcttgttcttcaatggataactgaccaaaaggcagcaaatcgagctggctggtgtagcgcaacccagcgtcacgccagtcctggccatccagcatcgctctggcccagccctgacggtgggtaaaatcaacattaaaactcaggcgcaacaagttgtccgggcaggcatcgaccaccaggacattttctcccaacatttgtaaactccaggctaatgcggcggtgatggttgttgtccccacgcctccccgcaccccctgctatcccagtacggccattcaccaatcccttacttttgttgcgcaaactctgccagcaacggccagcgttttaatgccgcggccaactgttcgcgttgggaaatatcggcataatcaatatcaggcagactaaatgcctgctttaacgccacaatatcattctggaagatatagcctatcgcgggatcaggcagagtatctggttcattgttattcattttgcttgatccctatgaaataaccgtaccgttcatgagacaattctaaccgtgagcatttcgccggtttattgtttacggcgagacgggaatttgctcactttttgactttccgttacgcaacagaaaaagttaaaaacgaaaagactaaaatcacacgtcttgtgaccttctaaattgattcacatgctaaatctgataagttttaatttcaatggtaggtttatttcttagctttcgctagtaaactgataatcagacaaaatggtgacatgagggacattgtggaccctgtattctctatcggtatcagtagtttatgggatgagctgcgacatatgccagcaggcggcgtctggtggtttaacgtcgatcgccatgaagatgctatcagtctggcgaatcaaacaattgcatcccaggctgaaaccgcacacgtcgcggtcattagcatggacagcgatccggcgaaaatctttcaattagatgattctcaagggccggaaaaaataaaattatttagtatgctaaatcatgaaaaaggtctatactatttgacccgtgatttgcagtgttctattgatccccataattacctttttattcttgtttgcgcaaataacgcatggcaaaacattcctgccgagcggcttcgcagttggttggataaaatgaataaatggagcaggttaaaccattgtagccttttggtaattaatcccggaaataataacgataaacaatttagtttgttgcttgaggaataccgtagtctttttggtcttgccagtttgcgttttcagggtgaccaacatttgctggatattgccttctggtgcaacgaaaaaggggtcagcgcccgtcagcagcttagcgttcagcaacaaaatggtatctggacattagttcaaagcgaagaggcggagatccaaccacgcagcgacgaaaaacgcattctgagtaatgttgctgtactggaaggtgcgccgccgctaagcgaacactggcaactgttcaacaataacgaagtcctgttcaatgaagcccgtaccgctcaggcggcgacggtggtcttttctttacagcaaaatgcgcaaatcgagccactggcccgcagcattcataccctgcgtcgccagcgcggtagtgcgatgaaaatcctcgtgcgggaaaataccgctagcctgcgcgccaccgatgaacgtttgttattggcctgcggtgcaaatatggttattccgtggaatgcgccactctcccgttgtctgacgatgatcgaaagcgtgcaagggcagaagtttagtcgctatgtgccggaagatatcactaccttgctgagtatgacccagccgctcaaactgcgtggtttccagaagtgggatgtgttctgtaatgccgtcaacaacatgatgaataaccctctattacctgcccacggtaaaggcgttctggttgccctacgtccggtaccgggtatccgcgttgaacaagccctgacgctgtgtcgccctaaccgtaccggcgatatcatgaccattggcggtaatcggctggtgctgtttctcagtttctgtcggattaacgatctggataccgcgttgaatcatattttcccattgcctactggcgacattttcagtaaccgtatggtctggtttgaagatgatcaaatcagtgccgagctggtgcagatgcgcttgcttgccccagaacaatggggcatgccgctgcctttaacgcaaagttctaaaccggtcatcaatgccgagcacgatggtcgccactggcgacgaataccagaacccatgcgactgttagatgatgctgtggagcgcagtagttgatataagatgctgtggagcgctcatcatgatgaccatcagcgatatcattgaaattattgtcgtttgcgcactgatatttttcccgctgggctatctggcgcggcactctttgcgacgcattcgcgacaccttacgtttgttctttgctaaacctcgttatgttaaaccggccgggacgttacgccgcacggaaaaagccagggcaaccaaaaaatgactcaatttacgcaaaataccgccatgccttcttccctctggcaatactggcgcggcctttccggctggaacttctattttctggttaagttcggcctgttgtgggcgggatatcttaacttccatccgctcctcaatttggtgtttgccgcgtttctgctgatgccccttccgcgctacagcctgcatcgcttgcgccactggattaccctgccgatcggctttgctttgttctggcatgacacctggttgcctggcccggaaagcataatgagccagggtagccaggtggcggggttcagtaccgattatttaatcgaccttgtcacacgctttattaactggcagatgattggggccatttttgttttattagtggcctggttattcctgagtcaatggattcgcattaccgtttttgtggttgccatactgctatggctgaacgtacttaccctggcgggaccaagtttctccttgtggccagccggacaaccgacgaccactgtaacaacgacgggtggtaacgcagcggcaaccgttgcggcgacgggtggcgcaccggtagtgggtgatatgcccgcacaaactgcaccgccaacaacggcgaaccttaacgcctggctgaataatttctataacgcggaggcgaaacgtaaaagcaccttcccgtctagcctgcccgctgatgctcagccatttgaactactggtgattaacatctgtagcctttcctggagcgatatagaagccgccgggttgatgagccatccactgtggagccatttcgatattgagttcaagaactttaactccgccacctcctacagtggcccggcggcgatccgtttactgcgcgccagctgcgggcagactagccacactaatctgtatcaaccggcaaataacgactgctatctgtttgataaccttagcaaactgggctttacccagcacctgatgatgggacataacggccagttcggcggttttttgaaagaagttcgcgaaaatggcggcatgcagagcgaattgatggatcaaacaaatctgccggttattttgctgggctttgatggtagcccggtttatgacgataccgctgtgcttaaccgctggctggacgttaccgaaaaagataaaaacagccgtagtgccacgttctacaacacgcttccactgcatgacggcaaccattatccgggggtcagcaaaacagcggattacaaagcgcgggcgcagaaattctttgatgaactggacgccttctttactgaacttgagaaaagcggtcgtaaagtgatggtggtcgtggtgccggaacacggcggcgcgctgaagggcgacagaatgcaggtatctggcctacgtgatatccctagcccgtctatcaccgacgtccccgttggggtgaaattcttcggcatgaaggcaccgcatcagggggcaccgattgtcatcgaacaaccgagcagcttcctggctatctccgatctggtggttcgcgttctcgatggcaagattttcaccgaagacaatgttgactggaaaaaactcaccagtgggttgccacaaacagcaccggtctccgagaacagtaatgcagtagttattcaataccaggataaaccgtacgttcgcctgaacggcggcgactgggtgccttacccgcagtaagaacgaaaaaggccgcagagtttcccccctgcggcctggtccgggcgcaaattgccattacggcagcctgacgcccgcatgacacgttacttccgcttgttcagccagttcacgatcatactggcaagaatgccagcaatgaccggagccgctaaatcatgccagaaggccatgcccagctctgcgaacgtcatatagccgcctgtgttgtaatgacaacgtttcgcggctattcttgagtggtctagagtcaagattagcccccgtggtgttgtcaggtgcatacctgcaacgtgcgggggttttctctctccagcaaccaatgccaccagggataaagcccccgcaacattgcgcctcaccggaacctttccggcttgccgctgattctacgattgctttttactgtcagcacccggcaatcttcctcattgcgcgatgccttccagcttaatttctttatttgcaatagttgcagttcatatccgggctgactccagactggtagtgaaatgcgcaattttgtagaattgcgcctcctcgcgacctccccagtgaatctgttgcctcattttttacatactgcgtattcgacttctccacctgttgcgcaagagaaactgggtttattcatttttgcgaggccgacttctttctggacaggactttatgcagcacaacacactaagcaaacacaatcagaaattgccgtttacacgctacgacttcggctgggttttattatgcataggcatggcgattggtgccggaaccgtgctgatgccagtacaaattggcttgaagggaatttgggtatttattaccgcagcgatcattgcttatcctgccacctgggtagtgcaggacatttatttaaaaaccctttctgaaagcgattcctgtaatgactacaccgatattatcagtcattacctggggaagaactggggaattttcctcggggttatctactttttgatgattatccacgggatttttatctactctctctccgtggttttcgacagcgccagctacctgaaaaccttcggtttaaccgatgccgatcttagtcaatctctactttataaagtcgctattttcgccgtactggtggcgattgcgtctggtggtgaacgattactgtttaagatttccgggccaatggtggtggtcaaagtagggattattgtcgtgttcggttttgcgatgatcccgcactggaatttcgccaatataaccgccttcccgcaagcctccgtctttttccgcgatgtcttgcttaccattccattttgcttcttttctgcagtatttattcaggtacttaacccaatgaatattgcctatcgtaaacgggaagcggataaagtactggcaacccggctcgcgctgcgtacccaccgaattagttatatcacgctcatcgcggtgatcctgttttttgcctttagctttaccttcagtattagccacgaagaagccgtttctgcctttgaacaaaatatcagtgcactggcgctggccgcgcaggtgatccctgggcatatcattcatatcacctctacggtgcttaatatctttgccgtactgaccgcattctttggcatttatctcggtttccacgaggccattaaaggcattattctcaatctgttaagccgaattattgataccaagaaaattaacagtcgcgtgctgactctggcgatctgcgcttttatcgtcattacgttgacgatttgggttagctttcgtgtaagcgtgctggtgttctttcagttgggaagcccgttatatggtattgtgagctgcctcattccgtttttcctgatctataaagtcgcacaactggaaaaacttcgcggatttaaagcctggctgattctgctgtacggcattttgctatgcttgagcccactgttgaagctgattgagtaaaccggagcgcatggccccggttttgtgagttaacgctgcggattttcatcctgatcaacagcaaaacaagctaccagttgaccgccgtagtcttttagctgcggctgcaactgggtgcaggggccgaagcgccgacgacagcgggcgttgaaggcgcaacccggcggtggattcagtgggcttggtagttcaccgctgagcttgatgcgctcgcggcgatcgtccgggttcaggcgcggcgtcgcggaaagtagcgcctgagtgtacggatggcgcgggttattgaagatttggtctttcgttcccttctccacgcagcggcccaggtacatcaccatcacttcatcagcaatgtgctccaccacgctcaggtcgtgggagataaagacataagacagccccaactcctgctgcaaatccatcatcagattcagcacctgcgcgcgcacactaacatccagcgcggaaaccggttcatcggcaatcaccacatccgggtcgagcatcagaccacgggcgatggcgatacgctgacgctgaccgccggagaacatatgcggatagcggtcatagtgctcggttttcaggccgactttcgccatcatgctcagggctttttcccgacgctgttctttgcttaagctggtgttgatcagcagcggctcttcaagaatttgcccgacttttttacgcggattcaggctaccgtaagggttctggaagacgatctggattttctgccgacgcagcttctgcgcctgcggatcgtgcttaagcagatcctgcccctggtaatacagctcgccaccggtgggcatttcaatcatcgtcagcaaccgaccgagggtgcttttaccgcagccagattcgcccactactgccagcgttttgccacgttcaaggttaaagctaacgccatccagcgctttaaccagacgttccggcgcgaacatgcctttcttcaccggataatgttttttcaggtcgatagcctgcaacagcggttgttgcagggtggcctcttgcgtactcatagtgtcggcctcccggcatcatcaagtgggtaatggcatttggactgacgcccgtcagcgagcatattcagcgccggttcttcagcgcgacatctgtcagtggcataggggcagcgcgggttaagcaggcagccgttcgggcggtcgtacttgccgggaacgacacctggcaagctcgccagacgttctttgtcctgagcaaattctggcagcgcacgcagcaatgcctgagtatacgggtgacgcggcgcatggaagatggcgtgcgcatcaccggtttccaccacctggcctgcatacatcacgatgattttatgtgccgcttccgccaccagcgccaggtcatgggtaattaacaccagcgccatgttctctttctgctgtagctccagcagtagttcgatgatttgcgcctgaatggtcacgtccagcgcggtggtcggttcatcggcaatcagcagttttggccgacaggcaatcgccatggcgatcatcacgcgctggctcatgccgccggaaagctgatgcgggtaaacatccagacggcttgccggatcgggaataccgacctgattcagcaggtcaatcgctcgctgacggcgggtacttttgttgccgccctgatgcaccttaatcgcttccataatctggaaacccacggtgtagcacgggttaaggctggtcatcgggtcctggaagatcatcgccacttcggcacccaccaggttgcggcgctctttttcactgatacgctgcaaatcctggccgttaaactccagtttttctgccattacgcggcccggataatcaatcagccccataatcgccagactactgacgctcttaccggagccggactcacccacaatcccgaccacttcgccctgttttacgctgtagctgatgcggtctacggcgcggaacggcgcgctttcgtcgccgaaatgcacgcttaatttatctacatttaataacgccatctcgaacctcttactgcttcagtttgggatcgagcgcgtcacgcagaccgtcacccatcaggttaaatgccagcaccgtcagcaggatcgccagacccgggaaggtcacgacccaccaggcgctttgcgcgaactgcaacacgtcggagagcatggtgccccactcaggcgttggcggctgtgcccccatgccgaggaaaccaagagcagccatatcgagaatggcgttagagaaaccgaggctcgcctgaacaatcagcggcgcaaggcagttcgggaagatgttaataaacatctgacgcatcgccccggcacccgccacgcgagacgcggtgacgtaatcgcggttaacttccaccagcacggcggcgcgggttaagcgcacatagtgcggcaaggcaacgaaggtcagtgccagcgcggcgttaccaatgctcgggccgaaaattgccaccagcaccagcgccagcagcagacttggcagcgccagcatgatatcgaccacgcgcataatgatgttatcgaccaggccgccaaagtaaccggcgatcaggccgagaataacgcccataatcaggcttaacacaattaccagacagccaaccagcaggctcaggcgcgcaccgtacatcaggcggctcagcacatcacggcctacgtcatcggtgcccagcaagtgcgccatgctgccgccttcctgccaggctggcggggcgagcagtgcatcgcggaactgttccgccgggttatagggtgcaatccagttggcaaagatcgcgatgaacagcacgatgacgacgtaaaccagcccgacgaccgcgcctttgttgcgtttaaaatagtgccagaactcctgtaacggggtcatcggcaccggtgcgctaatcactttattttcagtaacctgactcatgatgtccccttacttcttatgacgaatacgcgggttcaccacgccgtacagcagatcgaccagcaagttgacgaggataatcatcgtcgccaccagcaatacgccgccctgcactaccggatagtcgcggcgttgcagtgcgtcaatcaaccagcgtcccagaccgggccagctgaagatggtttcggtcagaatcgcccccgccagcaatgttcccacctgcaggccgataacggtcaccaccggcagcatcgcgttacgcagcgcatggacgataatcacccgcatgcgggttagccctttggcgcgcgcggtgcggatgtaatcctcgcccagcacttccagcatgctggagcgtgtcatacgcacaatgaccgccagcggaatagtacccagcacaatggcaggcaagatcatatgggcgacggcatcgataaagttgccgtcttcaccccagatggcggtgtcgattagcataaaaccggttaacggattggagtcatcgaggaacaccatatcgctcacgcgaccggagacgggcgtcaggttccagtgcacgctaaccagcatgatcagcatcatgccccaccagaagataggcatactataacctgtcagcgccaggccaaccgctgtgtgatcgaaaatggaaccgcgtttaaccgcagccagcacgccgaccggaataccgactgccgtagcaaaaatcatcgcgcagacgccaagttccagcgtggcctggaagcgcggcacgaactcttcccaaaccgggatgcggcttttcatactaatgcctagatcgccatgcataacgccccaaatgtaatggagatactgctgccacatcggtttatctaagccgagttcagccagcagctgcgcgtgacgctctggggagatcccacgttcgcccgccatgatcatcaccggatcgcccgggatcatgtggacaaaggcaaatgtgagaagggtaataccgataaacgtggggatgacgagtcccaaacgtcggagaataaactgcaacataacccggattctctatagtgacccgcagcctggaactgcgtgtctgtattgctcacaaatcaattcccgcccttatcggacagggaatgaagtattgctgccggatggcgctgcacgcagaggcacagcgccaccgggtatacagattgttgacaaagtgcgctttgtttatgccggatgcggcgttaacgccttatccggcctacaaaatcgtgcaaattcaatacattgcagaattttcgtaggcctgataagcggagcgcatcaggcatttttgcctttgccatcagtcttgtatggcttttaattattcgatagagacgttttcgaagtgatgtttgcctaatggatcaaccacatagcctttaacttctttacgtaccggttcaaacacggtggagtgagcgatgatcagtgccggagcctgatcgtgcatcaccacctgcgcttgtttgtacagttcaacgcgtttattgtggtcgtcggtagcacgcgccggttgaatcagatcttcaaacggtttgtagcaccatttactgtagttggagccttgttcagaggcggcgcagctgaacaggatggcgaagaagttatccggatccccgttatcgccagtccagcccatcattaccgtctggtgctcgccatctttcgcacgcttgaggtactcaccccattcgtaggtgacaattttggcctgcacgccgactttcgcccagtctgcctgaatcatctccgccatgcggcgagcgttcgggttatacggacgttgtaccggcatcgcccacaggtcgatggagaaacctttttccagacccgcttctttcagcaaggctttcgctttttcaggatcgtaggtgtagtcctgaacgtcgtcgttatagccccacatggttggcgggatcaggtttttcgcacttacgcccgcgccctgataaaccgctttgatgatcgcgtctttgttcaccgcgtaggtcagagcctggcgaactttcacgtcatcgagtggttttttctgcacgttatagctgagataaccgacgttcagccccggcatttccatcagattgatggatttatcctgcttcatgcgagcgatatctgccgggttcgggtacggcatcacctggcattcattcttctgcaatttcgcgtaacgcacggaagcgtcaggggtaatagagaaaaccagcgtatcgatctgcggtttggtgccccagtagccatcaaacgctttgtagcggatacgggaatctttttgatactgctgtaactggaacggaccggttccgattgggttgaggtccagtttttccggtgtaccggctttcatcatcgcatcagcatattctttactcagaatagaggcgaagtccattgccaggtcagcgaggaacggcgcttccgggcgagtcagcacaaactgaacggtgttgtcgtccacctttttcacttcactgatcagctctggcaagcccatgccttcgaagtattcgtagctgccgccagaaactttatggtacgggttttgcgcgtttttctgacgatcgaagctgaacaccacatcatcggcgttcagttcacgcgtcggtttgaattctttattgtcgtgccacttcacacctttacgcagatggaaggtataggttttaccgtcttcgctgacttcccacttttcagcgaggcccgggatcacttcggtggtgccgattttaaattcaaccagacggttataaagcgggacggaagaggcgtcataggtggtgccggaggtaaacagctgcgggttaaacccttccggagatccttcactgcaataaaccagagttttagcctgaacacttgctgcgacggtcatagccaccaggctgagaccaagcttcagcatcccactctttttcaaggaaatacgcattattctgctccaattgtgatgtttgttgttttaaccctttgcagtgggttgtcgctgcctgaccttttttgttttttgcccggtcgggtcaacgttatgaggtggggatgccgtactaattaacatcagtgtaacagtgcggatcctccataaaatgcccctcgtgacctacaatctgtcaacagaatgtgaaaacgtcaatacagccaaccgggatttacaccaacggtgagaatccacacacaaagattaaaaaaacttcaaacagctatttgcagcagagaaatttgtgctactccaacatgaccagaacaatcagcttaatatttagcaacatttggtgattaagttttatgcatttaatgaaaaaaatctgaggaaaaggtggatatctgagcgattaataccatgaacgctaaaacgcacagcggaaaatgccagggccagccataagtaacgcaaaaaaagatttaagcaaatataaaaaaagacaatggtttctgtcacaaatccgttaatggatagtgagatatggggcgcaaatttggcagggaaatgtgtgtcgtgtaggtcgaataaggcggtcgcgccgcatccgacaatggccggcacatttgcctgatgcgacgctgacgcgtcttatcaggcctacgtcgagtcgaacctccctgcccccggaggttctcatcctcatgagctgcagatgcaaaaaagcctgctcgttgagcaggcttttcgaatttggtcggtgatagaggattactcgccacttcgtggctcgccctgcgggccgttgctggcgcaacgttctctcgcttcgctcgagtcgaacctccctgcccccggaggttctcatcctcatgagctgcagatgcaaaaaagcctgctcgttgagcaggcttttcgaatttggtcggtgatagaggattcgaacctccgaccccttcgtcccgaacgaagtgcgctaccaggctgcgccaatcaccgaatgcggggcgcatcttactgcgcagatacgccctcgtcaatcccttaatagcaaaatgccttttgatcggcgagaaagtcagcaggccgcttagttagccgctgcctcttttgcctgcgggatgtgacaccagttgttgttttcgttaattccaccatccggactagtatagccaagacaacccatgatggtatcgtacagctctacgtgacggcgtggcactttcatgtcggcttcttttttcagctgcgcaaacgcctgcgcattggccggattttccagatatttatcactcatccagaccatcatcggtacgcggaactgctccggcggtgccagttcacgcggcgtgccgtgcaggtgctcgcgttcattaatactctcaccgtggtcagctgcgtagaacacaatcgctttcttatcgcgaacctgatcaatcacgctggagataaagtgatccacataggtcacgctgttgtcataggagttgatcatctgcgctttggtacagccgctatcaacaccaatacattccggcttccactgcgcgaagctacgcggataacgctgggtgtagttaaaatggctacctttggtatgcagaatgatcagatgcttaccatccgggttgcgccctaggctttgctgcatttcgtctaccagcaacatatcatctaccggcttgccacgattacgtggctccgcaccaatctgctcacgataagcaatgttgtccgccatcgtgttgctgtagaaccacatttcgctctgcatagcgtagaggtcagaactgaatcctaactgcttcagaaccgcgaaaatgttctgttcttttaatgtgcgctgcggattatcttccgcgcccccctgacgtacaaacatgcaacgcagactgagtttggttgcggtatcacaggagtaaccacggaacgccgccagatttttctcctgggccagtttcggcgtggtattacgctcatagccgaaaatacccatatggtcccaacgcgtggtttcaccgatgataaacacgacataagtgtcatcaacgttttgcggtgcctgataagtgaatttcttcgccggattaagcaaactattattatcggaagattcatcgacccgcgcccaggcatacagccccaacgcagaaagccagttacttggcagataagagttcgctacgacaccgccataactcggcaaatcaacgccggtcgccctctccactttcttctgctggatatccagcaaacgaatcggtgcccaaaccataatacccgccagtacgacgaccgccaggctgcgaatacgctgccctggggttcgcagttgtcggagcaaggtgtagcgacagcggttattccagataaggataagaggcaatgcactaacggcgattaaccagagaataaagttcagaccaacaacttctttactcaggtcgatatcggtggtcatgacggaagcgatgatgccataaccaatgaccacattaaggaaggtcatgtaatagctggcacctgcggaaaagagcaccaccaggcttgccagaatacgccagctgcggcggccaaacaggctaagaagacgtagtaaaaagaaggtcaccagtacggtggcggccagttcaacaacagcagaaatgcctttccagacggtaaaatcgtgcgcatagctgccgaagcggcggtaaaaaaccgcgccattcataaaaaggccaatatagattgcaagcaaaaagctcagcttctgctgtgtaatgcttttgatgtatctcatgcaaacaaaccctggacaaacaggtgataacaccctgcttagtggcttttcaggcccggcagggaaaaagtgcggaggtagtcagataagtaaaatctacacgcgcgaataagtagaccacagcaaagggaaaaagtgtggggaaagagtgtgcatgaagcacaaatttacaaaaatgcaagtttgaaaagagactttagcgttacaaaaagcagtaaaaagggccagttaattggcccaaattttacgagtcattgtttatacatttcgttgatgcgtttgatgcacacggaagctgaagcccagtagctcgcggctgagcattaaagggagccatgcgcctcacgcaacattttctgctctggctgacgaatcgtcgtagaaagcgccaaactcagaatcagcagggcgaaaatcacgtagaaggtcacatagaagccgccaaacagactggcgataatgctaccacaaatgctaccgataccgaaaccgagataaatcacaccgtagtttttcgccaggttattgaggccaaagaactcactgaccagactcggaaagacggtaatagtgccgccaaagttaaatgccacgcaggcaatcgctgcaaagaacgtcactgcattcaatggtgcaaacagcagggccgccatacccaccaggcttatcacctgaccaatggtaataacacggatacgggcgattttgtcagacagaatacccagcaccagacgaccactaaggttggcgatggaaataacagtgactgcattggctgcggaaaccacatcaaggtgtgccagactttgggcgatatctttcgctaccccaatcacgtacaggccgctcatgcaggcggtcaggaacattaccgctaacatccagtactgcggtttacgcatgctctctgccagcgtgtaatctttctccaccacaccattgctggttttcacttcctgttttggtgcgtctttcattaacgttgcgccgaaaacaatcatcaacagcgcaatcgctccccaaatcacaaaggttttttccagaccgaccgtttccagcagctgcgtgtcgataaatttgaaacccaggctacccagaccataagaaccgatagcgaacgcggagatcagacctttacgctccgggaaccacttcacacagttagagagcgtcagcagataacccgcgccatctgccagtcccaccagcacaccggcgcttaaccacagcatcatcaggttgtcagaatgcgctgtcaggaagaagcctaatcccagcaaaatgccggaagccatggtgacgcgtttaacgccaaaacgttcctgtaatttgcccgcaacagaagagctaattgccagccccagacttaacaagccgaaagagaaagcgacctggcttaccggcgcatccagcttggcggaaagcgcgccattaaacaggctccaggtataaacgctccccagcgcaaactgggtaatgatagtaccgatgagtgtcagccagcgggtacgctgataattactaggtgtcatggcagtattcctgcagtaataaaaaggaaaaatctctgccgacaaccataacgaagtgcactttatgcctggggaaaaacggcatgaaatgccatcagaacggaatgaaatgccttagttcaggaatgaatgacgcgacaattattcaccaaatttattatttggtaagttagcacccactatcgccacaactattgttatttaatggtttcaattgtgactgttacgttaaaatctggcgctaacccccatcgtatacagatagtcgctattattagtggtattttctgcctgagttagcgcggcataggcggcaatattttgattgagcaacatatcagcgcctacggtgacatccagccagttgccgttctggtttgtcgccgtcatccggctcaggccactttgcgccttccagatattctcgccaaattgctggttatagctgatttgcgcccagggtcggagatcgccaagccgggagtcaacacgccagcctaaggtactcacgctggcatgccataacggatcggtcagcgtggtagtactgtcgccaaactcgttatacatgctggtggttgtgccatcgtaatgtaatgccgcgaccgggccggttgtaacctgttcatataaaggaaaattccagcccatactcatactgctggtcacatccacaggggtttcttccgccagattgacttccagtcccagcgccctttggctactttgaatacgttggctcaaaatatcgttgtaatcaggttgatgatcactatcccaggtgtaacgctctgtggaaagtccgggttgcgtatcaacgatatattcttgttgccaggcgtaagctgtgttgagaaaaaaggcactgattaccacgctcgccagcaggcttagctgccagcgaccaccgcttttttttatgatcattaacacgactccagggaagagccgaattcggcaatattattgtcattgtatgaaggatatcgggcatagtagccctgtattaaatattgactttttcaccgatgcgtcaagaaaagcggctgaaatttttacgatcgggtacatagcgagggaaagtatggaacgttgcggctgggtgagtcaggacccgctttatattgcctaccatgataatgagtggggcgtgcctgaaactgacagtaaaaaactgttcgaaatgatctgccttgaagggcagcaggctggattaagctggatcaccgtcctcaaaaaacgcgaaaactatcgcgcctgctttcatcagttcgatccggtgaaggtcgcagcaatgcaggaagaggatgtcgaaagactggtacaggacgccgggattatccgccatcgagggaaaattcaggcaattattggtaatgcgcgggcgtacctgcaaatggaacagaacggcgaaccgtttgtcgactttgtctggagctttgtaaatcatcagccacaggtgacacaagccacaacgttgagcgaaattcccacatctacgtccgcctccgacgccctatctaaggcactgaaaaaacgtggttttaagtttgtcggcaccacaatctgttactcctttatgcaggcatgtgggctggtgaatgatcatgtggttggctgctgttgctatccgggaaataaaccatgattcgggaagcgcaacgtagtgaactccccgcgatcctcgaactgtggctggaaagtacaacctgggggcatccctttataaaagcgaattactggcgtgactgcattccgctggtgcgggatgcctatcttgccaacgcgcaaaactgggtctgggaagaagacggtaagcttctcggttttgtcagcattatggaaggccgatttctggcagcgatgtttgtcgcaccgaaggccgtcaggcgcggtattggtaaggcgctgatgcagtatgtgcagcagcgccatccccacctgatgctggaggtttatcaaaaaaatcaaccggcgataaatttttaccaggcacagggttttcacattgtcgattgcgcatggcaggatgaaacccaactacccacatggattatgagctggccggtggttcaaacgctgtaattaactgctggccggtggttcaaacgctgtaagtgtcagttccggaccgttgtatttttccagccatgccagcgccgtattacccgcacagccattccccagccggctgctggggagatctttggtcagcacgttcactgcgccgtttttacaaataccgtcagcggttaaatccagatccggccatgccccttcgtgaatgcaaatcacgccaggtttaattccctcgctaatgaccgctccggcaagaatttgcccgcgtgcgttccacaaccgaacagtatcgccatcttgtatgccgcgctcctgggcatcgtcaggatgaatggtgacaggctcacgatttgccaccgcgtacaattcgcgcagagaactgtaattcagctggctgtgcaggcggtgcgccggatgggcagaaagtacctgcaactgttctggttcggcattgccctgccattcgtccggctccagccacattggatgcccagggcaatccgggtaaccgtaatcggcaatacgctgactgaagatttcaatcttgccgctggcggtttttaacggatgcgccagcggatcgcggcaaaaatcagcgaagcgaataaaccgctcgctgtccgggttttccggcatctcaattaactggttggcttgccagaactcagcaaatggcggcaattcaacctgctggcttgccccgcgctgtcgggcaacgttataaaacgtttccagccattgcagctcactttttccttccgtaaaacgtgcataaccgcccttctcccagcgttcacttaactcggcaaaaacatcaaaatcattacgcgcttcatagcgtggcggcaccacttgcttcatcggcaccagatgctgattactgtaatcaccggtcatggtgagatcattacgctcaaaagaggtagtcgcaggcagaacgatatccgcgtgttttgccgccgccgtccagaagcattcagagatcaccaccagctccggtttttgccaggcacggatcaggcgattggtatcctgatgatgagtaaagttggcaccgcccgcccaccagataaaacgaatatccgggaaatgtcggttcataccgttgtgttgatatgcgccaccagggttttccagtgcttcaacaatgcgggcaacagggattttatccaccgcatcgcagccacccggcaagctgccctgcatggaagagagcaccgcagaacgccgcgtggggttaccaccattggcaaaatggtaagaaagaccaaaaccgccgccgggtgtgccgatttgccccaacattgctgccagcgtgacgatcatccagtgtttttgctcaccaaactgttggcgctgcattccccagcctgccatcagcatggtggtattttggtggaaaatagccgccagctcgcggattttcgctgcgccaacaccacaaatctctgctgcccattcggcggttttcgctattccgtcactctcgcccagcaaataagaggcgaagacggcataacctgtggtgcaacgcgccagaaacgcttcgtcgtgccaaccattttccaccagcgtatgggcgatccccagcatcagcgcaacatcggtgcccatgtgcggtgccacccactccattttatcgccaaagaaatcgacggtttcgcttcgcattggatcaatgcagatcagctttttcccgctgtcacgcagtgcagaaaagtaagaaagcccctgctcatcggatgcattccacgcaattttcagcgtattgagtgggttagcactccacagcaccacgacatcgctatgttccagcaccagcggccaactggtctgctgttgataaacttcactaccacccacgacatacggcatgatcgcctgtgccgcgccggtgctataatcccccagatgcccggtataaccgcctgccagcgccatatagcgttgtaataatgtgctggccttatgcagcacgccgttactacgccagccgtaggaaccagcaaaaatgcttgccggaccataagcctcacgaatgcgtttatgttgttggtgaataagatccagcgcctcatcccaactcacgcgaacaaattcatcctgcccacgaatgccttgcgggttttccggactcgcaagaaagccttttcgcaccattggaaatcgtacccgcgtattgctgtgaacctggtcgcgaaccgcgctctgcaaggagttttccattcctgtggctaacgcgccacggctgctaaacacggtttcgccgtcggtttcaaccagcatgggcccccaatgggcggcagtcagaacggaatatcgtgaggatgagttggccaaaccgaagactcctgaaaggttagatgtattgagcagttaaatattacttacaaatttccgagtattcccaggaataatcttcatgttcacgcggcataatctcccgccacggaacccgtggcaaagaataaaaaggttattaaggattaacaatgaagaaacgtgtttatcttattgccgccgtagtgagtggcgctctggcggtatctggctgcacaactaacccttacaccggcgaacgcgaagcaggtaaatctgctatcggcgcaggtctgggctctctcgtgggcgcgggtattggtgcgctctcttctagcaagaaagatcgcggtaaaggcgcgctgattggcgcagcagcaggcgcagctctgggcggcggcgttggttattacatggatgtgcaggaagcgaagctgcgcgacaaaatgcgcggcactggtgttagcgtaacccgcagcggggataacattatcctcaatatgccgaacaatgtgaccttcgacagcagcagcgcgaccctgaaaccggcgggcgctaacaccctgaccggcgtggcaatggtactgaaagagtatccgaaaacggcggttaacgtgattggttataccgacagcacgggtggtcacgacctgaacatgcgtctctcccagcaacgtgcggattccgttgccagcgcgttgatcacccagggcgtggacgccagccgcatccgtactcagggccttggcccggctaacccaatcgccagcaacagcaccgcagaaggtaaggcgcaaaaccgccgtgtagaaattaccttaagcccgctgtaatccctttcatgccaggtgatgcagaaatcacctggcattcttcagttttccttcatcatatttcaggctaaggtgatcgccttatcagtgaatggagagaagcatgaagccgtccgttatcctctacaaagccttacctgatgatttactgcaacgcctgcaagagcatttcaccgttcaccaggtggcaaacctcagcccacaaaccgtcgaacaaaatgcagcaatttttgccgaagctgaaggtttactgggtagtaacgagaatgtaaatgccgcattgctggaaaaaatgccgaaactgcgtgccacaagtacgatctccgtcggctatgacaattttgatgtcgatgcgcttaccgcccgaaaaattctgctgatgcacacgccaaccgtattaacagaaaccgtcgccgatacgctgatggcgctggtgttgtctaccgctcgtcgggttgtggaggtagcagaacgggtaaaagcaggcgaatggaccgcgagcataggcccggactggtacggcactgacgttcaccataaaacactgggcattgtcgggatgggacggatcggcatggcgctggcacaacgtgcgcactttggcttcaacatgcccatcctctataacgcgcgccgccaccataaagaagcagaagaacgcttcaacgcccgctactgcgatttggatactctgttacaagagagtgatttcgtttgcctgatcctgccgttaactgatgagacgcatcatctgtttggcgcagaacaattcgccaaaatgaaatcctccgccattttcattaatgccggatgtggcccggtggttgacgaaaatgcactgatcgcagcattgcagaaaggcgaaattcacgctgccgggctggatgtcttcgaacaagagccactgtccgtagatagcccgttgctcagtatggccaacgtcgtcgcagtaccgcatattggatctgccacccatgagacgcgttatggcatggccgcctgtgccgtggataatttgattgatgcgttacaaggaaaggttgagaagaactgtgtgaatccgcacgtcgcggactaagccgcgactgcgtagagtaaagcccgataatcgctcgggcttttactctttattgggttgcagtaactgctgtagtccaggcctgattaaacgcctgatgctgtgccggtaatggcgcaatcagtttgttatattcacttgcctgctgactagtcgggaactggatgccatttgcgacaaagctcacctgagtaccttgctgagcaatgtagtctccaaccatcaccagttgttgcgtgaaagtttgtgccgccggaatcaacggttgcaatgcatcagctggcgtcgttaccactttggtgaatgcctgatcaaagaccggtttcaaatcatcgctctgttttagcgcagagtgcgcagcatcggcctgcaacttcgcattttgcagttgttgcgccagcacacccaggctaccgttcatttcacgcagcggaccgctttgcgtaacgtaatcctgcggtacgcgaattgcgttaacgctgtctacaaccgggcgcagaccggaatccatcgcctgattcacctgctgagaataaccatacagaatcgcgtaatcagagacaaaaggaccaaactgttttttctgatcggcagtcagggttggtagacgttcaccgctacgcatcactgtattctgcaggaagtcgataaacgctttacgctgatcgccttctttatcaaaacacccactcaggctaactaccattaataacgccgcaagaggcgcaaaccagcgagagcaggactttcctgtcgccattttcttactcctttcacccaaaaaaagcgcacaacgacacacgcgtgtctgacgtgacaaggatagtccaggacaggcttgcaggataccctttctacgtaatcttcctggtaaaatcatggagaaaatgaaacaaggttaatttgttgtttcattgttaaaaaatgatagtgccgttgccttttttgtagccagagatttacgccttcgcagaaggttagattttcgaaatctttacaaaacaggagtggtaagagatatatcggcatttatcagatcgttaggtggctataagtcacgctaaatgacaggctgaatcgaatcatagccagagcatgccctgacttcaccccgctgtgtctgcttttcccgactattcttaatgagcttcgatgcaattcacgatcccgcagtgtgatttgaggagttttcaatggaatataaagatccaatgcatgagctgttgagcagcctggaacagattgtttttaaagatgaaacgcagaaaattaccctgacgcacagaacaacgtcctgtaccgaaattgagcagttacgaaaagggacaggattaaaaatcgatgatttcgcccgggttttgggcgtaagtgtcgccatggtaaaggaatgggaatccagacgcgtgaagcctagtagtgccgaactaaaattgatgcgtttgattcaagccaacccggcattaagtaagcagttgatggaataaacttttatccactttattgctgtttacggtcctgatgacaggaccgttttccaaccgattaatcataaatatgaaaaataattgttgcatcacccgccaatgcgtggcttaatgcacatcaacggtttgacgtacagaccattaaagcagtgtagtaaggcaagtcccttcaagagttatcgttgatacccctcgtagtgcacattcctttaacgcttcaaaatctgtaaagcacgccatatcgccgaaaggcacacttaattattaaaggtaatacactatgtccggtaaaatgactggtatcgtaaaatggttcaacgctgacaaaggcttcggcttcatcactcctgacgatggctctaaagatgtgttcgtacacttctctgctatccagaacgatggttacaaatctctggacgaaggtcagaaagtgtccttcaccatcgaaagcggcgctaaaggcccggcagctggtaacgtaaccagcctgtaatctctgcttaaaagcacagaatctaagatccctgccatttggcggggatttttttatttgttttcaggaaataaataatcgatcgcgtaataaaatctattattatttttgtgaagaataaatttgggtgcaatgagaatgcgcaacgccgtaagtaaggcgggaataatttcccgccgaagactcttactctttcaatttgcaggctaaaaacgccgccagctcataactctcctgtttaatatgcaattcacacagtgaatctcttatcatccgggtgaaaaataaaagcgtgaaacaaatcactattaaagaaagtaatctatatttctgcgcattcccagcctcctgtgttgatttccaacgagtataactttgatttatagtcaggtggggcttttctctgtctgcctttcggtgaatacctgagacaaacagtctcaagcacccgtggctattctagcttaataagtttgtttcttctccttgatataatcctaaaaaaatctcataaaattaatatatgagataatctttattcagcagaagattattaaaggttgctgtattatttagcgataaaaaaagcctgccagatggcaggctatttaataacggcgttattattgcaacaggctaatatccgcaacgcgcaggaacagttcgcgcagtttctccagcatggtcagacggttgatacgcaattctttgtcatcaaccatgaccatcactttatcgaagaaagcatcaaccggttcacgcagctcagccagttcgaccagcgcatcctggtaacgaccttccgtaaagtacggctccagcttgtcacgtagcaccacaacctgcatcgccagtttaatttcttccggctctttcagggtagaggcattcacgcggtcgctcagcacttcgtcagatttcgccagaatgttagatacacgtttgttcgccgccgccagtgcagcagctgcatccagggtacggaaatggcttaccgctttcatacgggcatcgaaatcagccggacgagtcggacgacgcgccagtaccgcctggatggtgtcaacggtataaccttcgtcctgataccaggcgcggaagcgaccgagcataaagtcgataacatcatcaactacgttggcattagtcagcttatcgccatacagacgcaccgcttcttcggtcagcgtttgcagatcaaggttgaggttcttctcaacgataattcgcagcacgccaagcgcggcacgacgcagcgcaaacgggtctttgtcgcctttcggatgctgaccgataccgaagatacccgccagggtatccatcttgtcagcaatcgccagcgcacaagctactgggttggacggcaggtcatcaccagcaaaacgcggctgatactgctcattcagcgccaccgcgacatcttccgcttcgccatcgtgacgcgcatagtgcatccccataacgccctgggtgtcggtgaactcgaagaccatgttggtcatcaggtcgcacttagacagcagacccgcacgggtagcgtggttaacgtcagcgccaatctgttcagcaatccagccagccagcgcctggatgcggtcagttttgtcgcgcagcgtccccaactgttgctggaacaacacggtttgcaggcgcggcaggttatcttcaagacgttttttacggtcggtgttgaagaagaactcggcatccgccagacgcggacgaacgactttctcgttaccggagataatctgctgcggatctttgctttcgatgttggcaacgaagataaagttcggcagcagtttgccgtcgttcgcatacaccgggaagtatttctggtcacctttcatggtgtaaaccagcgcttcagccggcaccgcgaggaatttctcttcgaattttgcggtcagaacgaccggccactccaccaggctagccacttcttccagcaggctttcgcttaagtcagcgttaccgccaatcttacgcgctgcttcttcggcatcggctttaatcttcgccttacgttcttcgtaatcggcgatgactttcccacgctcacgcagaatttccggatactgatcggcgttatcgatggtgaattccggctcgcccataaagcggtggccgcgaatcacgcgatcggactgaatgcccagaatggttgccggaatgactttgtcgcccagcagcagggtcacggtgtgcaccggacgcacgaagtgcacgtcgcttgcgccccaacgcatcagtttcgggatcggcagtttcgccagagaagtcgcaaccatattcggcagcagtgcttcggtgctttcgcccttcacatgggcgcgatacagcagccattcgcctttatcggtagtcagacgctcagcctggtcaacggtaataccgcaaccacgcgcccaaccttctgccgctttgctcggtttgccttcagcgtcgaacgcctgggcaatcgccgggccgcgtttttcgatttcacgatccggttgcgcttccgccaggttagctactttcagcgccagacgacgcggagcagcaaaccattgaacggtgccgtgtgcgaggccagcgctatccagctccgcagtaaagttcgcagcaaaggactcagccaggctgcgcagtgcttttggtggcagctcttcagtgccgatttccaccagaaaagttttctcagacatagccgcctcttacttatctttgttgcacatcgggaagccgagggcttcacgggaagcgtagtatgcttctgccactgctttggtcagggtgcgaatgcgcagaatgtagcgctgacgctcggtgacggagatggctttacgcgcatccagcaggttgaagctgtgggcggctttcagaatacgctcgtaggctggcagcggcagcggattttccagcgccagcagctgctgcgcttctttctcgtactgctcgaagcaggtgaacaggaagtccacatccgcgtattcgaagttgtaagtggactgctccacttcgttctgatggaacacgtcgccgtaggtggttttacccagcgggccgtcgctccagaccaggtcgtaaacgctgtctacgccctgaatgtacatggccagacgttccagaccgtaggtgatctcgccggtaaccggtttacactccagaccaccaacctgctggaagtaagtgaactgcgtcacttccatgccgttcagccacacttcccagcccagtccccaggcacccagcgtcgggttttcccagttatcttccacgaaacggatgtcgtgaatagtcgggtccatgcccagctctttcagagaaccgaggtacagctcctgaatattgtccgggcttggcttaatgaccacctggaactgatagtagtgctgtaaacggttggggttttcgccgtagcgaccatcggtcgggcgacgagaaggctgaacataagcagccgccatcggttctggccccagctcgcgcagacaggtcattgggtgagaggttcccgcgccgacttccatgtccaatggttgaacaatggtgcagccctggcgagcccagtaatcctgtaaggtcaggaacaagccctggaaggtcctggtatcaaacttttgcatattatttcgtgctggatacgtgtggatttaaaggaagggatcagtatacccgctggatggaagatatacagtacgaaacgggaaaaagcagggcttaacgcatggaaagatgcaaaaaatggccatccgcgtcaaaagaacagacaaactgctctttacggaaggtataaccgcgcatttcatagcttccctggaactgttcgaaggcggtgacgtcgattttttgctcgccggtgttataacgttttgccgcctgatccttgcataacgcttccatattcaagctacgcagaggatcaacctttacccgttgtgctttctgcacgggactcggtatagaacaacccactagcaccataagcgccattgccggaaagaaagcgttcatcatcattaaattaccgtctggtttgcaggtgagtcttattatttatatcggtatagtggctgatatcttacgaatttccttaagcctctataagctgtagtgataaaactcagattattccagtgcgccaaccaaatgatttatcggtcagactttttttaaccagatacagagacacagatgcagcccaaaatttactggattgataacctgcgagggatagcgtgtttaatggtggtgatgattcacaccactacctggtatgtgaccaatgctcatagtgttagccccgtcacatgggatatcgccaatgttctgaattctgcctctcgtgtcagcgtgccgctatttttcatgatttccggctatctcttttttggcgaacgcagcgcccagccgcgccatttcttgcgtatcggcttatgtctgattttttatagcgcaatcgcactgctctacattgcgctgtttacctccatcaatatggagttagcgctgaaaaacctgctgcaaaagccagtgttttaccacttgtggtttttcttcgcgattgcggtgatttatctggttagtccgctgattcaggtgaagaacgtcggcggaaaaatgttgctggtgctaatggcggtgattggcattatcgctaacccaaacacagtgccgcagaaaattgacggttttgaatggctgccaattaacttatatatcaatggcgatactttttactacattctgtatggcatgttgggccgcgctatagggatgatggacacacagcataaagcactgagctgggtgagcgccgcgctgtttgcgacgggggtttttattatctctcgcgggacattatatgaattgcagtggcgcggaaattttgccgatacctggtatctttactgtgggccgatggtttttatctgcgcaatcgcgctattgactctggttaaaaacacgctggatacgcgtaccattcgcggacttggcttaatctcccgccatagtttgggtatatacggattccacgccttgattatccatgcgctgcgcacccggggaattgagcttaaaaattggccaatactggatattatttggatcttttgcgcgacgttggcagcgagtttgttactttctatgctggtacaacgaatcgacagaaacagattagtgagttaagtaaaagcccggtcacattggactgaccgggcttacgtgagttattcgctgtattcttcctgggtaacctgtgtttcttttggtgggtttattccggcatcacgaatatttttctgcaccgctactgcaccaaacaagcttaagaagaaagccagtccataaaaacctttttcgctgagtaataatgtcgcattccacagacctaccatcagtaatgcaacagagataataaagacagtcaggcaggtcatataataaatggaagtggtcggtatgccttcatacttgtcccgaacggtcttttgataagacgccgcagaaaacagtcctaataccagtacggcaaaataatatcctttttcatttaactgcatctctgcattccatagccctaacagataggtaacgataccaccaacgagagctatccaactcacaatactaaaggccggactataggtacttattttgttgtccatcacagtattcctttcattcctgaatatgtaagagctttatgttgctcatgcgctgcgaaacaaacgcatttgaccaaacaagcagacaaaaaaggcgatgggatagatcaccatttcataagtattgataggtgcgtttaaaacaccgataaacaagagaccgatagtgattaacgcaactaactggcagatatgggtaaaaaaatcatccagttgcccgagtttttctgcgcgaagatatgcatagttgccaaaagttgctgtcattaacacgccaagaaaatagccttttccacttaacaatgggcaactgatccatagcccaaccagataaaccagcgccccgacaacaaataatagtttcgccacagtcttactggttttcataacgatctccatatctaccagcgatacattacgagtaaccaacgaaagacaaaactgaaaaatgccattaacaaatgattttcagaataaattcatactaaatattaattaattactgagatatatagatgtgaattatcccccacccggtcaggcaggggataacgtttacgccattaatggcagaagttgctgatagaggcgacggaacgtttctcgtcgtggctgataagcggcataacgctgcgcatctggtagatggctctgttctaacggtagttgcggcaacaattcaatgaggcttttctctggattcgccgcgatctgcgccagccttgctgcgcccagtgctggccccacatccccccccgtacggtaatcgagctgctgaccgctgatatccgccagcatctgacgccagtactcactacgcgccccgcccccaatcaacgtaacactttgcggtttaataccgcaggcatgcacgacatccatgccatctgccagcgcataacccacgccttccagcactgctcgcgccagttcattggggccatgttgatgagtcaaaccaaagaaaacccccttcgcctggggattattgtgtggcgtacgctcgccggaaagataaggcagaaaccaaactggctcggcactttcatcagcctgttgagctgcagcgattaaagctgggacattgctcaggccggttaatttcgcggcccaatccagacagctcgctgcactcagcatcacagacattaaatgccaacgttgcggtagcgcatggcaaaagctatgtacggcgctttctggcttgcttaagaacccttcgctgacagcaaaatagaccccgctcgtccccaggcttaacattgcctgattagcatcaaccattcccacaccaactgcaccagctgcattgtcgccaccgcctgcgacaactggcaccgtcgccataccccacgctttcgcaacttcaggtaacaaagcaccagtaatttcgctgccttcgtataatgcgggcatctggtcacgagataagtcgcaagcctgcagcatgacgtcactccagtcacgctttgcgacatccagccacatggtgccagctgcgtcagacatatcgctggcaaactcccccgtcatacgcagacgcaagtaatctttcggtaataatactttgtcgatttgacggaatatctccggctcatgccgctgaacccatagcaatttaggcgcagtaaatccgggcatcatcaggttgccggtaatcacccggctttgcggaactcgcgcttccagcaaagtgcactcttgcgcacagcgcccgtcgttccacaaaatggcagggcgtaacacccgttgctgagcatccagcaaggttgctccgtgcatctggccggcaatacccaatgctttaacgtcctgcagagaatgctgatcgcccagagctttcattgcgcgatcagttgcctgccaccactgttccgggtcttgttcgctccagagtggatgcgggcggctaacggtcagcttttccgtttgcgcagcaaccacctcaccctgctcgttgagcaaaataacttttacgccgctggtgccaagatctatcccgatatacatatcgatcgttccttaaaaaaatgcccggtatcgctaccgataaccgggccaacggactgcacagttagccgttatttgtcgaacagataatggtttaccagattttccagttgttcctggcgaccactctgatgcaccggagacaaatgatgttcctgagcatatttggctaaatctgccagactcatttggcctttcaggatttgctggcccaattcgctattccagccggaataacgctgcgcgatgcgtttatccagctcgccatcttcaatcatgcgcgctgcaattttcagcgccagtgccatcgtatccatcgcgccgatatgaccgtaaaacagatcatatttatcagtactttgacgacgtactttggcatcgaagttcagaccaccggtggtgaaaccgcctgctttgagaatttcatacatcaccagcgcattctcttccacactgttcgggaactggtcggtgtcccagcccagttgcgcatcgccacggttggcgtcgacagaaccgaacaggccaagcgcaatggcggtggctatttcatgatggaaagagtgacctgccagcgtcgcgtggttagcttcaatgttcagtttaatctctttttccagaccaaactgtttcaggaagccatagaccgtcgcggcatcgtaatcatattgatgtttggtcggttcttgcggtttcggttcgataagcaacgtgccctggaaaccgattttatgtttatgctcaaccaccatctgcataaagcggcccagttgttcacgctcctgacgcaagtcggtatttaacagcgtttcgtaaccttcacgaccgccccacaggacatagttttcaccgcccaatttatgggttgcttccatcgctgtaacaacttgcgttgccgcccagctgaagacttcaggatctgggttcgtcgccgcacccgcgccgtagcgagggtttgtaaagcagttggccgttccccacagcagcttcacgccgctctcttcttgcttgcctgccaggacatcaaccatttgcgcaaaattattgatgtactcttttaagctcgcgccctcaggggaaacatccacatcgtggaagcaataaaatggcacatgtaacttgtggaaaaactcaaatgcgacatctgctttacgcttcgccaacgccagtgcctcaccaggctgctgccacggacgattaaacgcccccacaccaaacatatccgccccgttccagcagaaggtgtgccagtagcaggcggcaaaacgcaagtgctcttccatacgcttacccaacaccagttcgtcgggattgtagtgacggaatgctaacgggttactggatttactgccttcataacgaacgcgatcgagctggtcaaaataggcttgcatattgaactccataatcaggtaatgccgcgggtgatggatgatgtcgtaatattgggcactccctttcagttgctcaattatgttatttcacactgctattgagataattcacaagtgtgcgctcgctcgcaaaataaaatggaatgatgaaactgggtaattcctcgaagagaaaaatgcaataagtacaattgcgcaacaaaagtaagatctcggtcataaatcaagaaataaaccaaaaatcgtaatcgaaagataaaaatctgtaattgttttcccctgtttagttgctaaaaattggttacgtttatcgcggtgattgttacttattaaaactgtcctctaactacagaaggccctacaccatgaaaataaagaacattctactcaccctttgcaccagtctcctgcttaccaacgttgctgcacacgccaaagaagtcaaaataggtatggcgattgatgatctccgtcttgaacgctggcaaaaagatcgagatatctttgtgaaaaaggcagaatctctcggcgcgaaagtatttgtacagtctgcaaatggcaatgaagaaacacaaatgagccagattgaaaacatgataaaccggggtgtcgatgttcttgtcattattccgtataacggtcaggtattaagtagcgttgtaaaagaagccaaacaagaaggcattaaagtattagcttacgaccgtatgattaacgatgcggatatcgatttttatatttctttcgataacgaaaaagtcggtgaactgcaggcaaaagccctggtcgatattgttccgcaaggtaattacttcctgatgggcggcagcccggtagataacaacgccaagctgttccgcgccggacaaatgaaagtgttaaaaccttacgttgattccggaaaaattaaagtcgttggtgaccaatgggttgatggctggttaccggaaaacgcattgaaaattatggaaaacgcgctaaccgccaataataacaaaattgatgctgtagttgccagtaacgatgccaccgcaggtggggcaattcaggcattaagcgcgcaaggtttaagtgggaaagtagcaatctccggccaggatgcggatctcgcaggtattaaacgtattgctgccggtacgcaaactatgacggtgtataaacctattacgttgttggcaaatactgccgcagaaattgccgttgagttgggcaatggtcaggaaccaaaagcagataccacactgaataatggcctgaaagatgtcccctcccgcctcctgacaccgatcgatgtgaataaaaacaacatcaaagatacggtaattaaagacggattccacaaagagagcgagctgtaagcgttacgccccagcgcggagcgggggcgtgatttctctccatgccgcgtgaatgaattggcttaggtggagtcgttatgccttatctacttgaaatgaagaacattaccaaaaccttcggcagtgtgaaggcgattgataacgtctgcttgcggttgaatgctggcgaaatcgtcagtctttgtggggaaaatgggtctggtaaaagtacgctgatgaaagtgctgtgtggtatttatccccatggctcctacgaaggcgaaattatttttgcgggagaagagattcaggcgagtcacatccgcgataccgaacgcaaaggtatcgccatcattcatcaggaattggccctggtgaaagaattgaccgtgctggaaaatatcttcctgggtaacgaaataacccacaatggcattatggattatgacctgatgacgctacgctgtcagaagctgctcgcacaggtcagtttatccattagtcctgatacccgcgttggcgatttagggcttgggcaacaacaactggttgaaattgccaaggcacttaataaacaggtgcgcttgttaattctcgatgaaccgacagccagtttaactgagcaggaaacgagcattttactggatattattcgcgatctacaacagcacggtatcgcctgtatttatattagccacaaactcaacgaagtcaaagcgatttccgatacgatttgcgttattcgcgacggacagcacattggtacgcgtgatgctgccggaatgagtgaagacgatattatcaccatgatggtcgggcgagagttaaccgcgctttaccctaatgaaccacataccaccggagatgaaatattacgtattgaacatctgacggcatggcatccggttaatcgtcatattaaacgagttaatgatgtcagcttttccctgaaacgtggcgaaatattgggtattgccggactcgttggtgccggacgtaccgagaccattcagtgcctgtttggtgtgtggcccggacaatgggaaggaaaaatttatattgatggcaaacaggtagatattcgtaactgtcagcaagccatcgcccaggggattgcgatggtccccgaagacagaaagcgcgacggcatcgttccggtaatggcggttggtaaaaatattaccctcgccgcactcaataaatttaccggtggcattagccagcttgatgacgcggcagagcaaaaatgtattctggaaagtatccagcaactcaaagttaaaacgagctcccccgaccttgctattggacgtttgagcggcggcaatcagcaaaaagcgatcctcgctcgctgtctgttacttaacccgcgcattctcattcttgatgaacccaccaggggtatcgatattggcgcgaaatacgagatctacaaattaattaaccaactcgtccagcagggtattgccgttattgtcatctcttccgaattacctgaagtgctcggccttagcgatcgtgtactggtgatgcatgaagggaaactaaaagccaacctgataaatcataacctgactcaggagcaggtgatggaagccgcattgaggagcgaacatcatgtcgaaaagcaatccgtctgaataacgcattgaggagcgaacatcatgagcaaaagcaatccgtctgaagtgaaattggccgtaccgacatccggtggcttctccgggctgaaaagtctgaatttgcaggtcttcgtgatgattgcagctatcatcgcaatcatgctgttctttacctggaccaccgatggtgcctacttaagcgcccgtaacgtctccaacctgttacgccagaccgcgattaccggcatcctcgcggtaggaatggtgttcgtcataatttctgctgaaatcgacctttccgtcggcagtatgatggggctgttaggtggcgtcgcggcgatttgtgacgtctggttaggctggcctttgccacttaccatcattgtgacgctggttctgggactgcttctcggtgcctggaacggatggtgggtcgcgtaccgtaaagtccctagttttattgtcaccctcgcgggcatgttggcatttcgcggcatactcattggcatcaccaacggcacgactgtatcccccaccagcgccgcgatgagtcaaattgggcaaagctatctccccgccagtaccggcttcatcattggcgcgcttggcttaatggcttttgttggttggcaatggcgcggaagaatgcgccgtcaggctttgggtttacagtctccggcctctaccgcagtagtcggtcgccaggctttaaccgctatcatcgtattaggcgcaatctggctgttgaatgattaccgtggcgttcccactcctgttctgctgctgacgttgctgttactcggcggaatgtttatggcaacgcggacggcatttggacgacgcatttatgccatcggcggcaatctggaagcagcacgtctctccgggattaacgttgaacgcaccaaacttgccgtgttcgcgattaacggattaatggtagccatcgccggattaatccttagttctcgacttggcgctggtagtccttctgcgggaaatatcgccgaactggacgcaattgcagcatgcgtgattggcggcaccagcctggctggcggtgtgggaagcgttgccggagcagtaatgggggcatttatcatggctagtctggataacggcatgagtatgatggatgtaccgaccttctggcagtatatcgttaaaggtgcgattctgttgctggcagtatggatggactccgcaaccaaacgccgttcttgattttgataaaaattttctcaaagccggttacgtattaccggttttgagtttttgcatgattcagcaggaaaagaaccatgtttactaaacgtcaccgcatcacattactgttcaatgccaataaagcctatgaccggcaggtagtagaaggcgtaggggaatatttacaggcgagtcaaagcgaatgggatattttcattgaagaagatttccgcgcccgcattgataaaatcaaggactggttaggagatggcgtcattgccgacttcgacgacaaacagatcgagcaagcgctggctgatgtcgacgtccccattgttggggttggcggcagctatcaccttgcagaaagttacccacccgttcattacattgccaccgataactatgcgctggttgaaagcgcatttttgcatttaaaagagaaaggcgttaaccgctttgctttttatggtcttccggaaagtagcggcaaacgttgggccactgagcgcgaatatgcatttcgtcagcttgtcgccgaagaaaagtatcgcggagtggtttatcaggggttagaaaccgcgccagagaactggcaacacgcgcaaaatcggctggcagactggctacaaacgctaccaccgcaaaccgggattattgccgttactgacgcccgagcgcggcatattctgcaagtatgtgaacatctacatattcccgtaccggaaaaattatgcgtgattggcatcgataacgaagaactgacccgctatctgagccgtgtcgccctttctagcgtcgctcagggcgcgcggcaaatgggctatcaggcggcaaaactgttgcatcgattattagataaagaagaaatgccgctacagcgaattttggtcccaccagttcgcgtcattgaacggcgcagtacagattatcgcagcctgaccgatcccgccgttattcaggccatgcattacattcgtaatcacgcctgtaaagggattaaagtggatcaggtactggatgcggtcgggatcagccgctccaatcttgagaagcgttttaaagaagaggtgggtgaaaccatccatgccatgattcatgccgagaagctggagaaagcgcgcagtctgctgattagtaccaccttgagcatcaatgagataagccaaatgtgcggttatccaagcctgcaatatttctactctgtttttaaaaaagcatatgacacgacgccaaaagagtatcgcgatgtaaatagcgaggtcatgttgtaacgatgatgagaattgtcggcgtcacatcaggtaacgctgcgtggttgtcggatgcggcgtgaacgccttatccgacctacccgccaggcatgataaaacgcaccaacaacgcttcaggctcgtagctcaactgcctgagacaaagtaaaaagccttatccgactgacaagtcggataaggctcaaggaaatgcaattacatatgcgccgcgattaaccgttggttatcctggtacattgcgaacaggtagttgttataactcttccctttggtgctgtagcccttcagcttgtgaatcatcgctgtggcagtcacttcctgatccgctttacgcagctgcgcacggcttttacggaagctagagtaagccgggtgcgtattcaggttagtgacataggcgctcacgctttctttgacagaactaaactgactgtaccctttcactttacctggcgcattggtacaacgtcctttcatgcatttcatgccgaacaggttgttgttgttgcgcgccagcttgctcgttccccaaccgctttctgctgcagccatcgtcgccaccatactggtggggataatgtctacgcgttcaagcaaggtattccacgggatttttcgcgtattaccggaccacttcaccttgtagcgtttggcgatgtctttcagacgcgcacgctcagcaggactccattggccctgatactgtttactaatgagccagttacgttccgcagtaatggccgcattttggctggtaatgtaaggcattacggtccggagaaacgcctttttccttggtgttccggaagggtattttcgcaaatcaggaagactactactctttgcactattgcgagaatactcttgtttactgcttacctgtttattactagctttagttaagtgggacttttgactcgctgttgttgtgtgcgtcttcgctaacacctcactgctaaacaccagagtgagtaacataagaatcatcgccccatatcgtcgtatgggagtcaaaatcatcaggtctcctggtcggatttaatcattccaacaccttatatttttcacaaatttgagagttgaatctcaaatcatatcaaaaatagctgtcaagagcaccccaaggaatagtccaaatctgaaactatgtcacgtgttaacgattcagattggcgctaaatcgcagaaaatgtgggggttatcgcaaaattcagccgttttttgcgcgagatcgctcacccttgcttctcatcctgtggacttaccgctcagggatgagttttgtttggcttatcgctggcaaactgtctgaaatcgcagcaataaggactcatccgccatgaaactcgccgcctgttttctgacactccttcctggcttcgccgttgccgccagctggacttctccggggtttcccgcctttagcgaacaggggacaggaacatttgtcagccacgcgcagttgcccaaaggtacgcgtccactaacgctaaattttgaccaacagtgctggcagcctgcggatgcgataaaactcaatcagatgctttccctgcaaccttgtagcaacacgccgcctcaatggcgattgttcagggacggcgaatatacgctgcaaatagacacccgctccggtacgccaacattgatgatttccatccagaacgccgccgaaccggtagcaagcctggtccgtgaatgcccgaaatgggatggattaccgctcacagtggatgtcagcgccactttcccggaaggagccgccgtacgggattattacagccagcaaattgcgatagtgaagaacggtcaaataatgttacaacccgctgccaccagcaacggtttactcctgctggaacgggcagaaactgacacatccgcccctttcgactggcataacgccacggtttactttgtgctgacagatcgtttcgaaaacggcgatcccagtaatgaccagagttacggacgtcataaagacggtatggcggaaattggcacttttcacggcggcgatttacgcggcctgaccaacaaactggattacctccagcagttgggcgttaatgctttatggataagcgccccatttgagcaaattcacggctgggtcggcggcggtacaaaaggcgatttcccgcattatgcctaccacggttattacacacaggactggacgaatcttgatgccaatatgggcaacgaagccgatctacggacgctggttgatagcgcacatcagcgcggtattcgtattctctttgatgtcgtgatgaaccacaccggctatgccacgctggcggatatgcaggagtatcagtttggcgcgttatatctttctggtgacgaagtgaaaaaaagcctgggtgaacgctggagcgactggaaacctgccgccgggcaaacctggcatagctttaacgattacattaatttcagcgacaaaacaggctgggataaatggtggggaaaaaactggatcagaacggatatcggcgattacgacaatcctggattcgacgatctcactatgagcctagcctttttgccggatatcaaaaccgaaagtactaccgcttctggtctgccggtgttctataaaaacaaaatggatacccacgccaaagccattgacggctatacgccgcgcgattacttaacccactggttaagtcagtgggtccgcgactatgggattgatggttttcgggtcgataccgccaaacatgttgagttgcccgcctggcagcaactgaaaaccgaagccagcgccgcgcttcgcgaatggaaaaaagctaaccccgacaaagcattagatgacaaacctttctggatgaccggtgaagcctggggccacggcgtgatgcaaagtgactactatcgccacggcttcgatgcgatgatcaatttcgattatcaggagcaggcggcgaaagcagtcgactgtctggcgcagatggatacgacctggcagcaaatggcggagaaattgcagggtttcaacgtgttgagctacctcagcagccatgatacccgcctgttccgtgaagggggcgacaaagcagcagagttattactattagcgccaggcgcggtacaaatcttttatggtgatgaatccagccgtccgttcggtcctacaggttctgatccgctgcaaggtacacgtagcgatatgaactggcaggatgttagcggtaaatctgccgccagcgtcgcgcactggcagaaaatcagccagttccgcgcccgccatcccgcaattggcgcgggcaaacaaacgacacttttgctgaagcagggctacggctttgttcgtgagcatggcgacgataaagtgctggtcgtctgggcagggcaacagtaacttttccggcttcccgttcgtcagtacctcgggaagccgccaaccaggataaaatgtcagccctaatcagcgttgcaggataaagcaccgctcactcttcaacagaccgatttgcaccccagcaaatgtagcgttattgttaccttccttgctacagagttcgacagatatcccgctatgacattctccctttttggtgacaaatttacccgccactccggcattacgctgttgatggaagatctgaacgacggtttacgcacgcctggcgcgattatgctcggcggcggtaatccggcgcagatcccggaaatgcaggactacttccagacgctactgaccgacatgctggaaagtggcaaagcgactgatgcactgtgtaactacgacggtccacaggggaaaacggagctactcacactgcttgccggaatgctgcgcgagaagttgggttgggatatcgaaccacagaatattgcactaacaaacggcagccagagcgcgtttttctacttatttaacctgtttgccggacgccgtgccgatggtcgggtcaaaaaagtgctgttcccgcttgcaccggaatacattggctatgctgacgccggactggaagaagatctgtttgtctctgcgcgtccgaatattgaactgctgccggaaggccagtttaaataccacgtcgattttgagcatctgcatattggcgaagaaaccgggatgatttgcgtctcccggccgacgaatccaacaggcaatgtgattactgacgaagagttgctgaagcttgacgcgctggcgaatcaacacggcattccgctggtgattgataacgcttatggcgtcccgttcccgggtatcatcttcagtgaagcgcgcccgctatggaatccgaatatcgtgctgtgcatgagtctttccaagctgggtctacctggctcccgctgcggcattatcatcgccaatgaaaaaatcatcaccgccatcaccaatatgaacggcattatcagcctggcacctggcggtattggtccggcgatgatgtgtgaaatgattaagcgtaacgatctgctgcgcctgtctgaaacagtcatcaaaccgttttactaccagcgtgttcaggaaactatcgccatcattcgccgctatttaccggaaaatcgctgcctgattcataaaccggaaggagccattttcctctggctatggtttaaggatttgcccattacgaccaagcagctctatcagcgcctgaaagcacgcggcgtgctgatggtgccggggcacaacttcttcccagggctggataaaccgtggccgcatacgcatcaatgtatgcgcatgaactacgtaccagagccggagaaaattgaggcgggggtgaagattctggcggaagagatagaaagagcctgggctgaaagtcactaaaaattgcctgatgcgctacgcttatcaggcctacatgatttctgcaatatattgaatttggaagaatttgtaggccggataaggcgtttacgccgcatctggcataaacaaagcgcactgttccggcgttgagaaacgccggaaaacgtttcaaacaggctgctgccgtagccgatgccgctgcactttctcgacatccatgcactgcaacgcctttgtcgggcaggcttcaacacaggccggtcccgtctcccgatgccagcacagatcgcacttaatcgccctcgcctttttgcggctagaaacgacctccatcgcaccaaacgggcaagccagcatacagcttttacagccaatgcaacgtgtttgttcaacgaaaatatgcccatgttcgcggcttatcgcgtcaacagggcagacattcgcgcacggtgcatcttcacactgatgacaggctactgccgtggtccagcagtggtctttaatgacgaatacgggaaataaacacacgaatacgggaaataaactcgtctggactcaacgcagcgcaatcctgattctcatgatggctcactgcgcaagccacttcacaggtacggcaaccgatacatttcgtcgcatccgcaataataaaccggttcatgatcactcctttgcactaaaacagcagagtgccagagagcgcgtccctactgctttgatccaacgaaggaaatgttaaagttttggcacttgtccaaagcgttatgtgatcgcgcccaggtcatccctgacagtaaatcccagttcattagaaatagcctgcgcggtttcacgcagtggtttcaggagatttttctctcccacctgtttcagacgacttgtgctaaggctaatgctcacggcgtacggcacccgcccatgaatatcaaacaccggaacagcaatacaggagacgccgagttcgttttcttctctgtccatcgccgctccgctttcacgaatgtgcgccagttcgtcgaacatcgcgggcagctcggtaatggtattgcgggttaacggctggatctcatgctgatggctttcccagtaactcttcacgtagtccgggtgaccaaacgccatgtagatcttgcccattgcggaacagtagagcggcatatgctggccaatataggcacgggttcgcagcatcccggttgtgggttccagcttataaatcaaaatagcgtgatcgtcttcgcggctggagaagttaatggtttcaccagtggcgatgttcagtgcctcaagatgcggagcggcgatatgaatgatattcaggctagacagcgccttctgcccgacggcaataaatttggtggtcaggcgataactccctgcggcaggcgcggtggtcacatagccgcaggactgtaatccctgcaataagcgatggacggtactcttatttaaaccagccagctcgctaagatgcgccaacggacaaccgtttggatagttgctcaaaatctcaatcagcatcaacccgcgaaacagactctggcttccggctggacgctctttttcctgcgccatctcgttctctttttttcccatcacttctttccccattttgtcgcgtcctgatggtagcgcaaagtgtgccgtagttcacgatctcgacagataatttataaccaattgatttttatgtcttttgaaattcatcaatcagattgccttgttaaaaagtgatcgatatatttgaaatcaagtttcgcatattgaaattttaagccaaaaaagcgatcaaaaaaacaaggaagcctgggatgaaagtgacatttgagcagttaaaagcagcctttaatcgggtcttaattagtcgcggcgttgacagcgaaacggctgacgcctgtgcagagatgttcgcccgcaccaccgaatccggcgtttattctcacggcgttaatcgtttccctcgtttcattcaacaactggaaaacggcgatatcattcctgatgcccaacccaaacgtataaccagcctcggcgcaattgaacagtgggacgcccagcgtagcatcggtaacctgacagcgaaaaagatgatggatcgcgccattgaactggctgccgatcacggtattggtctggtggcactacgtaatgccaaccactggatgcgcggcggcagctacggctggcaggcggcggaaaaaggctatattggcatttgctggaccaactccatcgccgtaatgccgccgtggggcgcaaaagagtgtcgcataggcactaacccgctgatcgtcgccattccttccacgccgatcaccatggtcgatatgagcatgagcatgttctcttacggcatgttagaagttaaccgtctggcaggtcgtcagctcccggtcgatggtggctttgatgatgagggcaatttgaccaaagaacctggcgttatcgagaagaatcgccgcattttgccgatgggctactggaaaggttctggcatgagcattgtgctggatatgatcgctactctcctttccgacggcgcatccgttgccgaagtcacccaggacaacagcgacgaatacggcattagtcaaatttttattgccattgaagtggacaagcttatcgacggtcccacccgcgatgccaagctgcaacgcatcatggattacgttactagtgccgagcgtgctgacgaaaatcaggccattcgcttacccggccatgaatttactaccctgctggccgaaaaccgccgtaacggcatcactgttgatgacagcgtgtgggccaaaatccaggcgttatgaggagataagtcatgatttttggacatatcgcgcagcccaatccgtgccgtttgcccgccgccattgaaaaggcgctcgattttctgcgcgctaccgatttcaacgccctggagccgggcgttgtcgaaatcgacggcaaaaatatttatacgcaaattatcgatttaaccacacgcgaagcggtggtaaaccgtccggaagtgcatcgtcggtatatcgatattcagtttctggcgtggggcgaagagaaaatcggcattgctattgatacgggaaataataaagtcagcgaaagtctattagagcagcgcaatattattttttatcacgacagtgaacatgaaagttttatagaaatgataccgggcagctacgcaattttctttccgcaggatgttcaccgaccaggttgtattatgcaaacagcctctgagatacgaaaaattgtggttaaagtcgcattaacggcgctgaattaatcgaataatcgtctacgccagaacgcctgggtaatgttattgctctaactatattaataattcaggttgctgcacatgcgacttgaattatgacagacatagcctcaaggaatagctatgaaaaaaatactcgaagcaatactggcgattaatctcgccgtactttcctgtattgtatttataaacattattttaagatatggttttcagacaagcattttatctgttgatgaattgagtcgttatttatttgtctggttaacgtttattggcgcgattgtagcttttatggataacgcccacgttcaggtcacctttctggtggagaaactctcccccgcatggcagcgacgagtcgctctggttacccattccttaatcttatttatttgtggcgcactggcctggggcgcaacgctaaaaacaattcaggactggagcgattatagtccgatcctcggtttacccatcggcctgatgtatgccgcttgtctgcccaccagcctcgttatcgcattctttgaactgcgtcatttatatcaactcatcacgcgtagcaattctctaacgagcccaccgcaaggagcttaatcatggctgtgctgatttttctgggctgtctgttgggtggtattgctatcggtttgcctattgcctgggcactgttgttgtgcggggcggcgttaatgttctggctggacatgtttgatgtccagatcatggcacaaacgctggtgaacggagccgatagcttctccctgctggcgattccgttctttgtgctggcgggtgaaatcatgaatgcgggcggcttgagtaaacgcattgttgacctgccgatgaaactggtggggcataaaccaggcgggctgggctacgtcggcgtgctggcagctatgattatggcgagcctttctggttctgccgttgcggataccgccgccgttgccgctctactggtgccgatgatgcgcagcgccaactatccggtcaaccgggcggcggggctgattgcctctggcggcattatcgcgccaattattcccccttccattccgtttattatcttcggcgtttccagcggattatccatcagtaagctgtttatggcgggcattgcccctggcatgatgatgggcgcaacgctgatgcttacctggtggtggcaggccagtcgccttaatttaccccgccagcaaaaagcaacgatgcaggaaatctggcactcttttgtctccggtatctgggcgctgtttcttccagtcatcattattggcgggtttcgctccggcctgtttacccctaccgaagccggggccgttgctgctttctatgcgctgtttgtcgccacagttatttaccgtgaaatgaccttcgccacactttggcatgtactcattggcgcggcgaaaaccaccagtgtggttatgtttctggtggccagcgcacaagtttccgcctggctgattaccattgctgaactgccgatgatggtttctgatttactgcaaccgttggtcgatagtccgcgtctgctgtttatcgtcattatggtggctatcctgattgtcggcatggtcatggatttaacgccgacggtattaattcttaccccggtattaatgcctttagttaaagaggcaggaatcgatccgatttatttcggtgtcatgtttatcattaactgcagtatcggcttaattacaccgcctatcggtaatgtacttaacgttattagtggggtggcaaaactcaaattcgatgatgcagtcagaggcgttttcccttacgtcctggttttatatagtttattagtcgtatttgtttttattcccgatctcatcatcctccctttgaaatggattaattaaaaggaaaatattatgaaattacgctctgtaacctacgcattattcattgctggcctggctgcattcagcacatcttctctggcggcacaatctttacgtttcggttatgaaacaagtcaaaccgacagccaacatattgcggcgaaaaaattcaatgatttattgcaggagagaaccaaaggcgagctgaaattaaaactgttcccggacagcactctcggtaacgcgcaggcgatgatcagcggcgtacgtggcggcaccatcgatatggaaatgtccggcagcaataactttgccgggttaagtccagtgatgaacttgcttgatgtccctttcctgttccgcgataccgctcacgcgcataaaacgctcgacggcaaagtcggtgatgatctgaaagccagtcttgaaggtaaaggactgaaagtactggcctactgggaaaacggctggcgcgatgtcaccaacagccgcgcaccggttaaaacccccgccgacctgaaagggctgaaaatccgcaccaacaatagcccgatgaatatcgccgcattcaaagtctttggcgctaacccgatcccgatgccgtttgccgaagtctataccgggctggaaacccgcactatcgacgctcaggaacacccgatcaacgtcgtctggagtgcaaaatttttcgaagtgcagaagttcctttctctgacgcaccacgcctattccccgcttctggtggtgatcaacaaagcgaagtttgatggcttaagtccggagttccagcaggcgctagttagttctgcacaagaagcgggtaactatcagcgcaaactggttgctgaagatcagcaaaaaatcatcgacggcatgaaagaagcgggcgtggaagtcatcaccgatctcgaccgcaaagcctttagcgacgcactggggaatcaggttcgcgacatgtttgttaaagatgtgccgcagggagctgatctgctgaaagccgtggatgaggtgcaataaaccatgacgcaatactggctggggttagattgtggcggtagctggctgaaagccgggctgtatgaccgcgaaggccgggaggcaggcgtgcagcgcctgccgctgtgcgcattaagcccgcagccaggctgggcagagcgcgatatggcagaactgtggcaatgctgcatggctgtcattcgcgccctgcttactcattctggtgttagcggggaacaaattgtcggtatcggcatctccgcacagggaaagggcttgtttttgctggataaaaacgacaaaccgctcgggaatgctattttgtccagcgaccgccgggcgatggaaatcgttcgtcgctggcaggaagatggcatcccggaaaaactctacccgctgacccgacaaaccttgtggaccgggcatccggtgagcctgttacgctggctgaaagagcacgaaccagaacgctacgcgcaaattggctgcgtgatgatgacgcacgactacctgcgctggtgtttaactggcgtcaaaggctgtgaagagagcaatatttccgagtccaacctctacaacatgagtcttggggaatatgacccgtgcctcaccgactggctggggatcgctgaaatcaatcacgccctgccgcctgttgtcggatctgccgaaatctgcggggagatcaccgctcagacagccgccctgaccggtctgaaagcgggtacgcccgttgttggcggcctgtttgatgtggtttccaccgcactctgcgccgggatcgaagacgaatttaccctcaatgcggtgatggggacctgggcggtgaccagcggcataacccgcggtttacgtgacggtgaagcgcatccgtatgtctatggtcgctacgttaacgatggtgaatttatcgttcacgaagccagccctacctcttccggcaacctcgaatggtttaccgcacagtggggagaaatcagctttgatgagatcaatcaggccgttgccagcttgccgaaggctgggggcgatctctttttcctgccgttcctgtacggcagcaacgccggactcgagatgaccagtggtttctacgggatgcaggccattcacacccgcgcgcacctgttgcaggccatctatgaaggggtggtgttcagccatatgacccacctcaaccgaatgcgcgaacgttttactgatgttcacaccctacgcgtcactggcggcccggcgcactccgatgtctggatgcaaatgctggcggacgtcagcggtctgcgtatcgagctgccgcaggtggaagaaaccggctgctttggtgcggcccttgccgcccgcgtcggcaccggggtttatcacaacttcagcgaagcccaacgtgacttgcgacacccggtgcgcaccctgctgccagatatgaccgcccatcagctttaccaaaaaaaatatcaacgttatcagcatctcattgccgcacttcagggctttcacgcccgcattaaggagcacacattatgagccgaccacttctgcaactggccctcgaccacagtagtcttgaagccgcgcagcgcgacgtgacgctgttaaaagacagcgtcgatatcgtcgaagcgggcaccattctctgtttaaacgaagggcttggcgcggtgaaagccttgcgcgaacagtgcccggacaaaatcatcgttgctgactggaaggtcgccgacgctggtgaaacgctcgcgcaacaggcgtttggcgcaggcgctaactggatgaccatcatctgcgccgcgccgctcgcgacggtagaaaaaggccacgcaatggcacaacgctgcgggggtgaaattcagatagagctgttcggtaactggacgctggacgacgcccgcgactggcatcgtattggcgtgcggcaggccatttatcatcgcggtcgtgatgcacaggccagcgggcaacagtggggcgaagccgatctggcacgcatgaaggcgcttagtgatatcggccttgagctttccattactggcgggattacccctgctgacctgccgctgtttaaagatatccgcgtgaaagcgtttattgccgggcgggcactggcaggcgcggcaaatccggcgcaagtggctggcgatttccatgcgcaaatcgacgctatctggggaggtgcgcgtgcgtaatcatcagttagggatttatgaaaaagcgctggcgaaagatctctcctggccggagcggctggtgctggcaaaaagctgcggttttgattttgtcgaaatgagcgtggatgaaaccgacgaacggctcagtcgtcttgactggagcgccgcacaaaggactagcctggttgccgcgatgatcgaaacaggtgttgggatcccgagcatgtgcctgtccgcacatcgtcgctttccctttggtagccgtgacgaggcagtgcgcgaacgggcgcgggaaatcatgagtaaagcgattcgcctggcgcgcgatctcggcattcgcaccatccagctggcaggttatgacgtctattacgaagaccacgacgaaggcacccggcaacgttttgctgaagggctggcgtgggcagtcgaacaggcggcggcaagtcaagtaatgctggcggtggagattatggataccgcgtttatgaactccatcagcaaatggaaaaaatgggacgagatgctcgccagtccgtggttcaccgtctacccggacgtcggcaacctcagcgcctggggcaatgatgttcccgccgaactgaaactgggcattgaccgtatcgccgcgatccacctgaaagacacccagccagtcaccgggcaaagtcccggacagttccgcgacgtgccgtttggcgaaggctgcgtcgatttcgttggcatcttcaaaacgctgcataaactgaactatcgcggttctttcctgattgagatgtggaccgaaaaagccaaagagccggtgctggagattattcaggcgcggcgttggattgaagcgcgtatgcaggaggctggatttatatgttaacgtaaatgcaggaggctggatttatatgttagagcaactgaaagccgacgtgctggcggcgaatctggcgcttcccgctcaccatctggtgacgttcacctggggcaatgtcagcgcggtagacgaaacgcggcaatggatggtaatcaaaccttccggcgtcgagtacgacgtgatgaccgccgacgatatggtggtggttgagatagccagcggtaaggtggtggaaggcagcaaaaaaccctcttccgatacaccaacgcatctggcgctctaccgtcgctatgccgaaattggcggtattgtgcatacccacagccgccacgccaccatctggagtcaggccgggctggatctccccgcctggggcaccacccacgccgattatttttacggtgccatcccctgcacgcgacagatgaccgcagaggagattaacggcgaatatgaatatcagaccggcgaagtgatcattgaaaccttcgaagaacgtggcaggagtccggcacaaatcccggcggtgctggtgcattctcacggcccgttcgcatggggtaaaaacgccgccgatgccgtgcataacgccgtagtactcgaagaatgcgcctatatgggtctattcagccgccagcttgcgccgcagctccctgcgatgcaaaacgaactgctggataagcactacctgcgtaagcatggggccaatgcctattacgggcagtaatccctcacgccggggcttcatcgccccggcactacgaattgatatgttccttgctgtaacgccgcttccacgctgctggcgttaaaccagtatgtttctgaaaaatctgccggaaatagccaacgtcattaaaccgtattgcatggagcaggccgacaacgtcgagtcactgcataacctgttgctgcccgccgatgcgccatttacgacatttgaaggcaagggattgttcagccataagatcctgattcagacgccaggttcccggtatgaacagagcaatccagagcaacaacctttgtggcattacgacggagcaccagccgcaccgacatccaccggtgaattaaaaacgccagctcaccccggtgacaaaggtaaaactctcattacgatcaatcatcgggctgtcggtaatctcttccggcagctcgctgtatcctgcgctcgccatcaatacgacgtgctctcctatcgggtattttgccgtcaggctgacatagggcacccaggcatcctgcgcggaataacttgccagaccgctacgacgggactcactctcactaatgccatagtaatagtcactgaaattctcgtcataatagagaacgcccagcgcaggtgtcaggctcagacgacctatccgcattttgtggaatacgcttagctcccccacccagccgttgctgttatccagaacgtccgcagctgcagaggctttcacggttccccaacgctcgtggtgataccaggcaacccccgccatagccgtactatcacgcttatcaagctgttgcatggcataatcgtcattatcggtagggtcaaattccagcggcatccaggatgcggtcaggctaagttcatttttttcactttggctcagaataaaacctaacgtggtctgacgaacataaaaagtatcaccttcataactaatcagcggaattgccttcgtattttcattataaccgcgataagggctttcattataagccgcaccagcaccaatggataattcagaagcagttgcgcttgccataaaaggcaacgcaaataacgccacaatattgcgattaattaacatgtccggtattccattttaaaataagataaaaaagagtcggcataataatgcttacaatttctccggtgcaagattcatatttatatagtaatatataaaattatatataattgggctgttgcgatgacaaaattacaacttaagtaccgggagttaaaaattatcagcgtaatcgctgccagtgaaaatatcagccatgccgcgactgtacttggcatcgcacaggccaacgtcagcaaatatcttgctgattttgaaagtaaagtgggtttaaaagtccttgaccgaaccacccggcagctgatgctcacaccttttggcaccgcgctgttaccgtacatcaacgacatgctggacagaaacgagcaacttaataattttattgcagattataagcatgagaaacgtggtcgggtcaccatctacgccccaaccggcataattacctatttatccaaacatgtaatcgataaaattaaagatatcggtgatatcaccttaagcctaaaaacctgcaatcttgagcgtaatgccttttatgaaggcgtcgaatttcctgatgattgtgatgttttaatcagctacgctccaccaaaagatgaaagcctggttgccagttttattacccaatatgccgtaaccgcttatgccagccagcgctatcttgagaaacatcccattagccgtcctgacgaactcgaacatcactcctgtattttgatcgacagcatgatgatcgacgacgcgaatatctggcgcttcaacgtcgccgggagtaaagaggtgcgggattatcgcgtgaagggaaattacgtttgcgacaacacgcaatctgcgctggagctggcacgaaatcacctggggattgtgtttgcgccagacaaaagtgtgcagagcgacctgcaagacggcacgctggtgccctgctttcagcaaccctatgaatggtggctggatctggtggctatcttccgtaaacgggaataccagccctggcgggtccagtatgtgctggatgaaatgctgcgtgaaattcgccaccagcttgctcagagccagcaactgcggcctgaacaagcggcggaaagcgaagattaatgatcgagataaaggtaatgcacccagctggtcatgcgtaatagcactttgcgcatcacgctgacatggctgaaatgatcagagtaaaccgccacctgggcgtaaataccgtctggtaaagcgctcaaatcagtgtgctcatccagttcaatggtcgcgataacgccatcactacccggcgctgtgtttaacgtctgtaaggtgccggtgctctgataagctccgccgggaacggctggactaatggctgccagcttaccgctgaataccttacctggcagagcattaaacaccacttccgcatcgtcgccaggagccagtcgcagcaaggagttctgacggaactgcgccacgatttgtcgtttctgatcgggtataaacaccatcaccggacgtagcggcaggctcgcggcataggtacccggacgaatcagtacctgggtcacataaccatcgctcggcgcacgcactatcgtctgctcaaggttatattttgcttccgcgagctgtgctttcaggctggcgatttgagaatgttcacccaacaccaggctatccagctggctctggatctgtttttgttccgccgcgctactcttcacggaggcttcctgcgccagataattttgccgcgccacatcgatatcgcgttcactaaacgggtttactttcgcctggctgccacgtgcgtaacgctgatactctttagcgaatttatcccgcgtggcctttgcctgctgagtattcgccgccatctcatctaactctgcgcccaacgcccgctgtttatgttctgcggtaacgatatccgccatcagccgatccacccgcgcctgataacgcgtcgggtccagtcgaaatagcacctcaccttttttaatcagcgtatttttcttatccgtcacttcaatcaccacaccagtcacctgtgggacaacaggaatagaaataaccgctttttgcgctttaaaggtatacggatggttatagttcattaacagaattagaccgctgacaataaatattccacccagggccgctgtgggaatggtccatttatttacgggaattttgaagatcttaaacattgcccatgcaaaagccacataggtcaaaataatcagtaaatccataagtattactcggcagaagaggatttgatgtcggcgagctgtttctccagcccggcaatgcgctgttgcagttgcataacggaactatcatggctttgcattccccatccccgctccgggcggtaaagcgtggcccaaatccacaaaaacggccagataacatgtaacgtaaaaagactcacccaaccagcaacatgaatggcgtcggcatgaggatgattacgttttttggcaatcaggtagggaatatcatgtaaaataatgatcccatagaagatcaccagaaatacaaaaataagcactcccagtgcaaaatagtccaggaacatatttccctcaaagaatataaaaaagaacaattaacgcatattatgaaatgccatgatgcagtgcaatttccttatttatataacgacatattgttttttatatactttcttaaatgtgctgtctggtttttcaacaggacgaggtttatcatattgaaatagtggaactattggccaaactaatgaataactccagtaaaacatccacagtacagattaagcgtattaaaccttcaattatctaccgtttattgctgattggcctcggatcaccaatggtgatttacggcctggttcgcccgctcaccatcgaaacgcgagattaaactcctgacaaaacacgccccagaaacgtacttctgttggcgtagtctgggttattgcgcacgtaggtttaaaacgtaaattgtaacaacgtgcgctttgtttatgccggatgcggcgtgtacgccttatccggcctacggtcaggttcccgtaggcatgataagacgcgtaagcgtcgcatcaggcaatgaatacccaatgcgaccagcttcttatatcagaacagccccaacggtttatcgctgtagctcaccagcaggcacttggtttgctggtaatgctccagcatcatcttgtgggtttcgcgaccgataccactttgtttgtagccaccaaacgccgcatgtgccgggtaagcgtgataacagttggtccacacgcgcccagcctgtatgccgcgccccatcttataggccagattaccgttgcggctccagacgcccgcgcccaggccatattgcgtatcgttcgccagctccagcgcttcttccatcgttttgaaggtggtcaccgccagcaccgggccaaaaatctcctcctggaacacccgcatattgttctgaccaaacagaatcgtcggttcgaggtagtagccgtctttcagttcaccttccagcagcttgcgccgcccgcctgtgagcacgtcagcgccctcttttttaccgatatcaatgtagttgaggatggtttccagttgcccgtgagaaacctgcgcgcccatttgcgtcacgctgtcgagcgggttaccgctacgaatgctttcgacacggcggatggcgcgttccataaagcgttcgtagatagattcctgcactaaagcacgactcggacaggtgcaaacttcgccctggttaaaggcaaacagtgcaaagccttccagcgctttatcgaaaaaggcatcttcttcatccatcacatcagcaaagaagatatttgggctcttaccgcccaactccagcgtcaccggaataatgttttgcgttgcgtattgcataatttgttggcccacttccgtactgccggtaaacgccactttggcgatgcgtttgctggtcgccagatattcgccaattaccccacctgcgccattgaccacgttcaccacgcccggcggcagtaaatcaccgacaatttccattagcagcagtacagaaagcggggtaagacgtgcgggtttcagcaccacacagttgcccgccgccagcgcgggagccattttccagctcgccatcagcagcgggaagttccacgggataatctgccccaccacgcctaacggttcatggaaatgataggccacggtttcgctatcaacttcactgatcccaccttcctgcgcccgaatacagctggcgaaatagcggaaatggtcaatcgccagcggtacatccgcagcactggtttcgcgaatgggtttgccgttatcccaggtttcagctgtcgctaacagctcgaggttttgttccattcgatcggcaatcttaaacagaatcgccgcacgatcctgcacgctggtgtgcgcccatttatctttcactttgtgcgcagcatccagcgccagatcgatgtctcgtttgccgctagacgccacttcgcacagcagctgcccggtcaccggcgtcagattctggtaatactcgccgtcggcaggggctacccattcgccgccaataaagttgtcatagcgggcttttaacttgagggggaaaccatactcgccgggcttaatctgtgcactagggggattattggtcatgatcgtctccttgcggtgtgaggtataacaagggtagacgtgactggcgaaatcttcgccagtcggtaacagctttacgacagctatcacgaatttacgggcaagggttacagagatagttgaaaaagcggctaacaatttgccagccgttgtggaaatgatgattacatcgctgcgcgataaatcgccacaatttcttcgtgagttgcctggatcgggttagtaaagccacaggcatctttcagggcattagtcgccaataccgcgaaatcttcttctttcacgttcaggtcgcgtaggcctgccgggatatccactttcttcgccagttcacggatggcgttaatgcaggcttcagcaccttccgcgtcgtttttacctgtcacgttcacgcccattgcagcggcacagtcacgcagacgtgcagcggcgactttgctgttgaatacctgaacgtgcggcagcaaaacggcgttacatacaccgtgtggcaggttgtagaaaccgcccagctggtgcgccatcgcatgaacataacccagagaagcattattgaacgccataccggcgaggaactgggcataagccattgcttcacgcgctttcgcattactgccatcttcaacggctaacggcaggttttcggcaatcatggtcacggctttcagtgcacaagcgtcagtgatcggcgtggcggcaatagaaacatatgcttcgatagcgtgcgttaaggcatccatacccgttgcggcggtcagactcttcggcataccaatcatcagagaggagtcattgacagaaagcagcggagtgacatgtttatcaacaatcgccattttgatatgacgcgcttcgtcagtgatgatgcagaaacgggtcatttcagaggccgtacccgccgtggtattgatggcgatcatcggcagctgcggttttgcagagcggtcaacgccttcgtaatcgcgaatatcgccgccattggctgccaccagcgcaataccttttgcgcagtcgtgtggagaaccaccgcctaaggagatcacgctatcgcaattattctctttaagtaatttcaaacctgcggcgacgttttccgtggtggggttaggttgggtgccatcataaataacgctaaaaatattgcgttcttccagtgctttttgcacatcgcccgccatacctaatttcgttaacatattgtcagtgacaattaaggtacgggtaaatccataatctgccatcatattcattgcatcagtcaaactatcagcgccgatgacattcacagaaggaataaagaacgtactagctgccataacacactcctgaaagtgtaaaaaagggcgggcagcttactgaggattttcattcgaaaatatgatcagtattattgattatcaaaattaatctaataaaaagcacattgtattcattaaacaatgtgctttttttaaattcataagaattttgtattaatttattttaaaacttaattaatcatttccttatttttccggaaataataatgcgtcgcgcaataaatgatcatttccacgacgacgcgtaaagccaatgcggtcaaaatattccagaatctgaattgccagctttcggcctacgcctaagcgatcgcggaaatccgccgcgcaggtactaccacactcctgatcgagatcgcggatcatattggcaaactcgacaatccgatcgttacggtaataacgatctttaacgatcgcggtaattattccttgctgcgccgcctggcgtagagtcaggcgcattgcctgctcgtcggttcccgtctcttttgccaggtcacgcacccaccacggttcgtcaccaaacagtggctctgctttttgccagatggcctgctgctcttcgctgaagcccgctttgtgatctggcagatgcagccagccgtgatggctgtggatgtcgccgctttcgcgcatcttttcaatcagcaacagtaccagcgcttcatcttccattggcaacgccatacgtcgcagacgttcgcgcccagggccaggttcatcgcgatgttgctcatgataagtcgctaatgtgtcgagaattttccgctgccagcgggcggcaaccggcgcattcaacaagctataaccagcctgaatataaccaggctgttgcagcaattcgcgcatcccttcgccgttgagctggcgcgcccaggcgaaatccgcaaggttaaccgcgccgcgttccagatgaacagataacgcatcggcatcgctctgcgcccgtgcaagagacgccagccattgcagatattccggcttacgtttaccgcgacgcggcgggttaagcatcacgacgcgcgctccggccagcgtgttgcgggcagagatatcgcgcaataccaggcggtcgttatctgccagccataacggggtgtcgaagaccagttcagcaaggttatcttccagcagactaacgcgtcccgtgacgtggctggcggcgtggtgaatatgcagcggctgccactgggtcagcggtgtatgggtttgaagctcgacaatcacccgtgtgaacggctctggcggcacatcggcaagcagccagtcgccacggttaatctgctctttttccgcatcacccgcgatgttaagcgcgatacgctgcccggcattggcggtttctgttggctggttttgcgcatgcagcgcacgtacacgcatcggtttatttacaccagtcagccagagactatcgcctaccttcacttccccgcttaacgccgtaccggtgacgaccagcccggcaccttttacggtaaatgcgcggtcaatcgcgaggcggaaactatgttggctggcgtgctcgcgttccggcaactgaagcagatgctcgcgcagggcatccattccccgaccttcggttgctgcggtgataaacagttttgcctcagcaaaaccgtattcccgcagaacctcctttacctggcgttcaacctcatcaacacgcgcttcgtccacgcgatcggctttggtcagcgccactgtcagcatcgggttaccggtcagctgcaaaatcgccagatgctcacgggtctgtgccatcacgccgtcatcgcacgccaccaccaacagcgcgtgatcgataccaccaacgcccgccagcatgttggaaagaaacttttcatgaccgggaacgtcgataaaaccaggcacgcgaccatccggctgcggccagtaggcatagccgagatcgatggtcatgccgcgctttttttcttccggcagacggtcagcatttacgccagtaatcgcctgcaataaggttgttttgccgtggtcaacgtgtccggcagtcgcaataatcatttcaacaacatctccaaaaaccgttgctcatcttcaaggcagcgtaaatccagccacaatcgtccgtcataaatacgaccaatcaccggcactggcaattcacgccagcgggcggctaaactctcaaggtggctaccgcgtccatcatggggtgtaaacgttaatgccgcgctcggcaggcgatcaaccggcaggctaccactgccaatctggctaagacatggcataacctgtaccgcaaactccgcgccgtaatgtgcggcaaggggggcctgtaaacgttgtgcctggatttgaatgacctctgcgctgcgggtaagcaggcgcagggtcggtaatttttcactcagagcttcagggtgtaaataaagacgcaacgtggcttccagcgccgcgagggtcattttatccgcgcgtaatgcacgcttcagcgggtggctttgcaggcgggcgatcatctcttttttaccaacaataattcctgcctgcggcccgcctaacaacttgtcgccggagaaactcaccagactgacgcccgccgcaatcaactcctgcggcattggctctttcggcaaaccgtactggctaagatcgaccaggctgccactgcctaaatcagtcactacgggaacatccagctctttgccgagcgccaccagttccgcttcatctatcgctttggtgaacccctgaatgctgtagttactggtatgtactttcatcaacagtgcggtattttcattcaccgcctgacgataatcattcgcgtgcgtgcggttggtggtccctacttcgtgtagggtgcagcctgcctgacgcataacatcgggaatacgaaacgcgccgccaatctccaccagttcgccgcgagataccaccacctcttttccgctggcagtggccgccaacatcaataacaccgccgccgcattgttattgacgatacaggcatcttccgcccccgtaatacggcacagcagctgcgccagcgcccgatcgcgatgtccgcgtccggcgtcgtccagatcatactcgagggtcactgggctacgcatagcctgcgcaacggcttccaccgcggcttccgcctgtaaagctcgcccaaggttggtatgcagcacggttcccgtcaggttgatcaccggacgcagcgcgctctgcgcttctttcgtcaaccgggcatcgacttcttgcgcccagttttcacaccacgcaggcagcgtctggctgccacgaatcacttctcgcgcttcgtcgagcatctgacgcaacaattccaccacgcgggtgtgaccataagtatcacgcaaagaaaggaaggagctatcgcgcaataagcgatcaatagccggaagttgactatagagggaacgcgtttcggttgtcataggaaacctggctgatcaaggccctctcacacggagaagggcgtttaacataaccacggattgtaacgtgagatgggtcaggaggacatatcgcgcatcaagcctttggcggttcggtgcgagcaaaactttcgcggctaaacaggttttcgaccagtttgactaagtgtgggcggtcgacacaccaacctggcgcaacgcggcggaaattgagatatccgacggcacaggcaatggcgatagtcgccagattgaccgtatcggttttgagtgtgccatcgaccagatatccttccagcacatccagactgcggttgattttctcccgctggcgtaacaattcatcttcagactgctgcgccgctggacgcgcctgttcacgcacgcttaccagcccggcatccataatgccatccgccagtgcctcaattttgcgcacccgcaagctctccagcggatcgcgcggcaacatcgccggagcgacattcattaattcaatatattcagcgatgatcgggctatcaaaccagcattcgccctcttcggtcaccagcaccggcacttttcctaacgggttaaattgcgccacgccgttgtccgcgttatagggcagttcattaataaattcgaaagttatgcccttttctaacaacagaatagaaagtttgcgtacaaacgggctggtgtagctaccgacgagtttcatgccgagtcctttgtgcgaggaaaaatatcagtatggctcaatgatccaaataaagataatgcatccagctggtcattcttagcagcactttccgcatcacgctaacatggctgaaatggtcggagtaaaccgccacctgggcgtagatgccgtcgggtaaggcatcgatatcatcgttagggtccagttcaatggttcccagcacaccgtccgtgccgggcacgaccgttaaactttgcaataccccctgcgcctgataagaaccgcctggcacgacaggtaaaatactagtcagtttgccgtgaaacacctgcccaggtagcgcgttaaacaccacttccgcatcatcgccaggtttcagacgtaacaggctgttttgccgaaattgggcgacaatttgccgtttttgctcggggatgaagaccatcaccggacgcagcggcaaggcagctgcgtatgtacctgggcggatcagtacctgagtaacgtagccattgctcggcgcgcgaatgacagtctgctcaaggttatattttgcttcagtaagttgcgctcttaagctcacaatctggctttgctcgccgttaaccatactgtcgagctggctctggatctgcgcctgctccgccacgctgcctttcaccagcgcatcctgcgcgaggaaattttgccgcgcatcgtcgatgtcacgttcgctgaacggattcaccgccgcctggctgcctttcaagtaacgttgataatttttaaacagacggtcgcgctccgcactaacctgggtggtgttggcctgcgcttcagtgagctgcgcacgcagcgtctttatattatgcgtcgccgtcatcaggtcagcctgaagtctgtcaactcgcgcctggtaacgaaccgggtcgagcttaaaaagcacctcgcccttttgaataagctgattattcttgtcagtgacttcagtaacaattcccgtcacctgtggcgtgatagggatcgctatcactgccttttgcgcggtaaaagtgtaagggtggttgtagttcatcaacaaaatcaaaccactcaccagaaacacgcctcccagcgccgccgtcgccagcgtccactgatttaccggaatgcggaagattttaaagaccgcccacgccagcgccacgtaagttaaaacaatcaatagatccataattagatctccgggaacgtggaatagtcagtctttttctcggcggcgagttgatgctccaaccgggaaattcggtcagaaagtgcggcgatttccgggtcagtcgctttctcctggctcgcaacatgactctgcataccccagccacgctccggttgatagagcgtcgcccagatccacagaaacggccagataacatgcagagtaaacaggctcacccagcccgccgtatgaatagcgtcggcatggggatggttgcgctttttggcaatcagataagggatgtcatgtatcgcgatgattccataaaaaatcaccagaaagacgaagatcagcactcccaacgcgaaatagtttagaaacatatctgcctcggattcacgtttatcagtgttgtttttgggctggcagccagaagggagtcaggctgatattttgacaataatccgggttcgcgattctcgccataacaccaaagaataatttttagaggtgatgagttgcttagttacataacgattgtatgacgaaggcataacatgctgtagatcacatcaggtgaacgccgtaagaaaatatcttgtgattcagatcacaaagattcaacaaaccatcaaaacaaaaatgtgacactactcacatttaaatgccatttttagcgaaaatcgccgccttgttgcttttttacacaagcgttttgtgatgaacgtcacgtcaattacctctctaccccctatatttatgtgattgatatcacacaaaaggccgtcgactggacagttaaccgattcagtgccagatttcgcagtatctacaaggtccggctacctctgccgccacattaacaaaaaacctcgggcttccagcctgcgcgacagcaaacataagaaggggtgtttttatgagttccgatattaagatcaaagtgcaaagctttggtcgtttcctcagcaacatggtgatgccaaatatcggcgcgtttatcgcgtggggtatcatcaccgcgttatttattccaacagggtggttaccgaacgagacgctggcgaagctggtcgggccgatgatcacttatctcctgccgctgctgatcggttataccggtggtaagctggtaggcggcgaacgtggcggcgtagtcggtgccatcaccaccatgggcgttatcgtcggcgcagacatgccgatgttcctcggttctatgattgcaggtccgctgggcggctggtgcattaagcacttcgaccgctgggtagacggtaagatcaaatccggttttgagatgctggtgaataacttctccgcaggcatcatcgggatgatcctcgctattctggcattcctcggcattggcccgattgttgaagccctgtccaaaatgctggctgcgggcgttaacttcatggttgtccatgacatgctgccgctggcgtctatctttgttgaaccggcgaaaatcctgttcctcaacaacgccattaaccacggtatcttcagcccgctgggtattcagcagtcccatgaactgggtaaaagtatcttcttcctgattgaagctaacccaggtccaggtatgggcgtgctgctggcgtacatgttctttggtcgtggtagcgctaaacagtctgcgggcggtgcggcaatcatccacttcctggggggtatccacgaaatctacttcccgtatgtgctgatgaatccgcgtctgatcctcgcagtcatcctcggcggtatgactggcgtgttcacgctgactatcctgggcggtggtctggtttctccggcatctccgggttctatccttgctgtactggcgatgacaccaaaaggtgcttacttcgctaacatcgcgggtgtgtgtgcggcgatggctgtctccttcgttgtctctgctattttgctgaaaaccagcaaagtgaaagaagaagatgatattgaagcagcaactcgtcgtatgcaggacatgaaagctgagtctaaaggcgcatctccgctgtctgctggcgatgtgactaacgacctgagccacgtacgtaaaatcatcgttgcctgtgacgccggtatgggttccagtgcgatgggcgcaggcgttctgcgtaagaaaattcaggatgcaggtctgagccagatttctgttactaacagcgcgatcaacaacctgccgccagatgtggacctcgtcatcactcaccgtgacctgaccgaacgcgctatgcgccaggttccgcaggcacagcatattagcctgaccaacttcctcgacagcggcctgtacaccagcctgaccgaacgtctggttgctgcccaacgccacacggcaaacgaagagaaagtaaaagacagcctgaaagacagctttgacgattccagtgctaacctgttcaagctaggcgcggagaacatcttcctcggtcgcaaagcggcaaccaaagaagaagcgattcgttttgctggcgagcagctggtgaaaggcggttacgttgagccggaatacgttcaggcgatgctggatcgtgaaaaactgaccccgacttatctgggtgagtctatcgcggtgccacacggtacggttgaagcgaaagatcgcgtactgaaaacgggcgtcgtgttctgccagtacccggaaggcgtgcgcttcggtgaagaagaagatgacattgcccgtctggtgattggtattgctgcccgtaacaacgagcacattcaggttatcaccagcctgaccaatgcactggatgatgagtccgtcatcgagcgtctggcacacaccaccagcgtggatgaagtgctggaactgctggcaggtcgtaagtaatccaatcccaccctctccacatggagaaggtggggttaattgcctgatgcgctacgcttatcaggcctacaggatgcatcacaatttgttgaatttgcacgttcttgtaggccggataaggcgcttacgccgcatccggcgctgcccctctcctcacggagagggtttgggtgagggaaaagcctcaccccagccctctcgggtaaaaacattgatgaaggttaatactatgaaagcattacattttggcgcaggtaatatcggtcgtggctttatcggtaaactgctggcagacgcgggtatccaactgacgtttgccgatgtcaatcaggtggtacttgatgccctgaatgcccgtcatagctatcaggtacatgtggttggtgaaaccgagcaggtagataccgtttccggcgtcaatgctgtcagcagcattggtgatgatgtcgttgatctgattgctcaggttgatttagtcactaccgccgttggcccggttgtgctggaacgtattgctccggcaatcgccaaagggcaggtgaaacgtaaagaacaaggtaatgaatccccgctgaacatcatcgcctgtgaaaacatggtacgcggtaccacgcagctgaaaggccatgtgatgaacgccctgccggaagacgccaaagcgtgggtagaagaacacgttggctttgtcgattccgccgttgaccgcatcgtaccgcctagcgctagcgcaactaacgatccgctggaagtgacggtagaaaccttcagcgaatggattgtcgataaaacgcagttcaaaggcgcactgccgaacatcccaggcatggagttaaccgacaacctgatggcatttgtcgaacgtaaactcttcaccctgaacacgggtcatgctataaccgcgtacctcggaaaactggccggtcatcagaccattcgtgacgcgattctcgacgagaaaatccgcgcggtggtaaaaggtgcgatggaagaaagtggtgcagtattgatcaagcgctacggctttgacgctgacaagcatgcggcgtacatccagaaaattctcggccgttttgagaacccgtatctgaaagatgatgtagagcgcgtaggccgtcagccactgcgtaaactgagtgctggtgaccgtctgatcaagccactgctcggtacgctggaatatggtctgccacataaaaacctgattgaaggtattgccgctgcaatgcacttccgcagtgaagatgatccgcaggctcaggaactggcagcactgatcgctgacaaaggtccgcaggcggcgctggcacagatttccggtcttgatgccaacagcgaggttgtatccgaggcggtaaccgcttataaagcaatgcaataatggtggaccaggcgcaggacaccctgcgcccgaataacagattgagtgatatgcaggcaacaatggaacaaacccaggcctttgaaaaccgtgtgcttgagcgtctgaatgctggcaaaaccgtgcgaagctttctgatcaccgccgtcgagctcctgaccgaggcggtaaatcttctggtgcttcaggtattccgcaaagacgattacgcggtgaagtatgctgtagaaccgttactcgacggcgatggtccgctgggcgatctttctgtgcgtttaaaactcatttacgggttgggcgtcattaaccgccaggaatacgaagatgcggaactgctgatggcattgcgtgaagagctaaatcacgacggcaacgagtacgcctttaccgacgacgaaatccttggaccctttggtgaactgcactgcgtggcggcgttaccaccgccgccacagtttgaaccagcagactccagtttgtatgcaatgcaaattcagcgctatcaacaggctgtgcgaagtacaatggtccttagtctgactgagctgatttccaaaatcagcttaaaaaaagcctttcaaaagtaagcaacgtctgcttactgcccctctacctgcttcggccgataaagccgacgataatactccagacgttgtagatataacggcacgctttcatcgggtattccggacggaatcgcgttacggggaggaagttttttcagatactcccggaacgcctggctacttgccatgaaatctacggctttatcgataagaagcggaacgttttcacctaatttgcccatgatgatatctccgtattaccccgcgccgggaatgcgcggccgccaattttagtttaggttcccggtaaagatgacattaaggaaaacgtgctgaatcctcaataatcatccgctgctgtttattatcttttttctatagatttcttaattaatcaacgaattgcgcagtttttgagcatgttaatgattacgttacagaactattacaatgtcattagttgtgaacaaagcacctggtcgcgcatactaggggctataaatttatctttatcagaagccatcacatgaaagaagtcgaaaaaaacgaaatcaaacgcctcagcgatcgcctggacgccatccgccaccagcaggccgatcttagcctggttgaagccgcagacaaatatgccgagctggaaaaagagaaagccacgctggaagcagaaattgctcgcctgcgtgaagttcatagccaaaaactgagtaaagaagcacagaagctgatgaagatgccattccagcgcgcaattaccaaaaaagagcaggctgatatgggcaagctgaagaaaagtgttcgcggactggtcgttgtgcacccaatgaccgcactgggccgcgaaatgggcctgcaggagatgactgggtttagtaagaccgcgttttaagaacacagtatctacagggtgattctgcacattcctataggccgagtaaggtgttcacgccgcatccggcaagataaggcgctctggatcaacaacctaagggcaattctctgatgaggattgcccttttctttaccagacatctccccccacaagaattggccctaccaattcttcgcttatctgacctctggttcacaatttcccaattaaaactcacatcaatgttgccaatacataacatttagttaaccattcattgtcattatccctacacaacacaattggcagtgccacttttacacaacgtgtgacaaggagatgagcaacagactcattacacgatgtgcgtggactccaggagacctgcaatgaatctctggcaacaaaactacgatcccgccgggaatatctggctttccagtctgatagcaagccttcccatcctgtttttcttctttgcgctgattaagctcaaactgaaaggatacgtcgccgccagctggacggtggcaatcgcccttgccgtggctttgctgttctataaaatgccggtcgctaacgcgctggccagcgtggtttatggtttcttctacgggttgtggcccatcgcgtggatcattattgcagcggtgttcgtctataagatcagcgtgaaaaccgggcagtttgacatcattcgcagctctattcttagcataacccctgaccagcgtctgcaaatgctgatcgtcggtttctgtttcggcgcgttccttgaaggagccgcaggctttggcgcaccggtagcaattaccgccgcattgctggtcggcctgggttttaaaccgctgtacgccgccgggctgtgcctgattgttaacaccgcgccagtggcatttggtgcgatgggcattccaatcctggttgccggacaggtaacaggtatcgacagctttgagattggtcagatggtggggcggcagctaccgtttatgaccattatcgtgctgttctggatcatggcgattatggacggctggcgcggtatcaaagagacgtggcctgcggtcgtggttgcgggcggcagctttgccatcgctcagtaccttagctctaacttcattgggccggagctgccggacattatctctagcctggtaagtctgctctgcctgacgctgttcctcaaacgctggcagccagtgcgtgtattccgttttggtgatttgggggcgagtcaggttgatatgacgctggcccacaccggttacactgcgggtcaggtgttacgtgcctggacaccgttcctgttcctgacagctaccgtaacactgtggagtatcccgccgtttaaagccctgttcgcaagcggtggcgcgctgtatgagtgggtgatcaatattccggtgccgtacctcgataaactggttgcccgtatgccgccagtggtcagcgaggctacagcctatgccgccgtgtttaagtttgactggttctctgccaccggcaccgccattctgtttgctgcactgctcagcattgtctggctgaagatgaaaccgtctgacgctatcagcaccttcggcagcacgctgaaagaactggctctgcccatctactccatcggtatggtgctggcattcgcctttattagcaactattccggactgagtagtacactggcgctggcactggcgcacaccggtcatgcattcaccttcttcagcccgttcctcggctggctgggggtattcctgaccgggagcgataccagttctaacgccctgttcgccgcgctgcaagccaccgcagcacaacaaattggcgtctctgatctgttgctggttgccgccaataccaccggtggcgtcaccggtaagatgatctccccgcaatctatcgctatcgcctgtgcggcggtaggcctggtgggcaaagagtctgatttgttccgctttactgtcaaacacagcctgatcttcacctgtatagtgggcgtgatcaccacgcttcaggcttatgtcttaacgtggatgattccttaatgattgttttacccagacgcctgagtgacgaggttgccgatcgtgtgcgggcgctgattgatgaaaaaaacctggaagcgggcatgaagttgcccgctgagcgccaactggcgatgcaactcggcgtaagtcgtaatagtctgcgcgaggcgctggcaaaactggtgagtgaaggcgtgctgctcagtcgacgcggcggcgggacgtttattcgctggcgtcatgacacatggagcgagcaaaacatcgtccagccgctaaaaacactgatggccgatgatccggattacagtttcgatattctggaagcccgctacgccattgaagccagcaccgcatggcatgcggcaatgcgcgccacacctggcgacaaagaaaagattcagctttgctttgaagcaacgctaagtgaagacccggatatcgccagtcaagcggacgttcgttttcatctggcgattgccgaagccagtcataacatcgtgctgctgcaaaccatgcgcggtttcttcgatgtcctgcaatccagtgtgaagcatagccgtcagcggatgtatctggtgccaccggtttttagtcaactgaccgaacaacatcaggctgtcattgacgccatttttgccggtgatgctgacggggcgcgtaaagcaatgatggcgcaccttagttttgttcacaccaccatgaaacgattcgatgaagatcaggctcgccacgcacggattacccgcctgcccggtgagcataatgagcatagcagggagaaaaacgcatgattatttccgcagccagcgattatcgcgccgcagcgcaacgcattctgccgccgttcctgttccactatatggatggtggtgcatattctgaatacacgctgcgccgcaacgtggaagatttgagtgaagtggcgctgcgccagcgtattctgaaaaacatgtccgacttaagcctggaaacgacgctgtttaatgagaaattgagcatgccggtggcactggctccggtgggtttgtgtggcatgtatgcgcgtcgtggcgaagttcaggcagccaaagcggcggacgcgcatggtattccgtttactctcagcacggtttccgtttgcccgattgaagaagtcgcgccagccatcaagcgcccaatgtggttccagctttatgtactgcgcgatcgcggctttatgcgtaacgcgctggagcgagcaaaagcagcgggttgtagcacgctggttttcaccgtggatatgccgacaccgggcgcacgctaccgtgatgcgcatagtggtatgagtggcccgaacgcggcaatgcgccgctacttgcaagcggtgacacatccgcaatgggcgtgggatgtgggcctgaacggtcgtccacatgatttaggtaatatcagtgcttatctcggcaaaccgaccggactggaagattacatcggctggctggggaataacttcgatccgtccatcagttggaaagaccttgaatggatccgcgatttctgggatggcccgatggtgatcaaagggatcctcgatccggaagatgcgcgcgatgcagtacgttttggtgctgatggaattgtggtttctaaccacggtggccgccagctggacggtgtactctcttccgcccgtgcactgcctgctattgcagatgcggtgaaaggtgatatagccattctggcggatagcggaattcgtaacgggcttgatgtcgtgcgtatgattgcgctcggtgccgacaccgtactgctgggtcgtgctttcttgtatgcgctggcaacagcgggccaggcgggtgtagctaacctgctaaatctgatcgaaaaagagatgaaagtggcgatgacgctgactggcgcgaaaagcatcagcgaaattacgcaagatagcctggtgcaggggctgggtaaagagttgcctgcggcactggctcccatggcgaaagggaatgcggcataatcgtttgcgccccctcaccctaaccctctccctcagggagaggggaccgttcggcgctgtatgtactccctcactctgaaacgacaccgcactctttttttctccctcgcccctccggggagagggccggggtgaggggaaaaggccgcactgctcaccaattttctgctatcctgcccccgcactaagggggcagtatgctaaacatcgtactttacgaaccagaaattccgccaaatactggcaacatcatccgtctttgcgctaataccggctttcgtctgcatatcatcgaaccgatgggatttgcctgggacgataagcgcctgcgccgcgcggggctggactatcacgagtttaccgccgttacgcgtcatcatgactatcgcgcgttcctcgaagcagaaaatccccagcgcctgttcgccctcaccacgaaaggtacacctgctcacagcgccgtaagctatcaggatggcgattatctgatgttcggcccggaaacacgcggcctgccagcgagcattcttgatgccctgcccgctgaacaaaaaattcgcattccgatggtgccggacagccgcagcatgaatctgtccaatgcggtgagcgtagtggtgtatgaagcctggcggcagttggggtatccgggagcggtattgagagattaattactgtaggccggatagatgattacatcgcatccggcacgatcacaggacattagatcccatccccatactcaaatgtatggttaataccgttgaaatgctggtccatatccatacttggcttatcgctgtctggtttaccgacaatacgagccggaacgccagcggcggtggtatgcggcggcaccggttgcagcaccacggaacctgcgccaatcttcgcgccgcgcccaacttcaatattgccgaggattttcgcgcccgcgccaatcatcacaccttcacgaattttcgggtgacggtcaccaccagatttacccgtaccgccaagcgtcacagattgcagaatgcttacgtcgttttcaatcaccgccgtttcaccaacgacgatgcctgtcgcgtggtcaagcatgataccgcgaccaatttttgctgccgggtgaatatcgacctggaacgtcacagaaacctggttttgcagaaagattgccagtgcgcgacgcccctgattccacaaccagtgaccgatgcgataggcctgcaaggcatgaaaacccttcaggtataacaacggggtactgtatttatcgactgccgggtcgcgggtacgcaccgcctgaatatcacaggccgcagaggcgatcatttccgggtcagcggcgtaggcttcttccaccacttcacggatagcaatagcaggcataattgggctactcagcttgttcgccagcatgtagctcagtgcactgccaaggttttcgtgcttgagtagcgtcgcgtggtaaaaactggccagcattggctcacagtccgccagcgttctggcttcggctttaatattgttccagacaatttccagttcttcacagctcattgcttactccacacgatgagataatgaccggcccgttctgcgcgggccgggtcatagcggtaacaaaggttccctggggttagtggctgctgcgctcgtccttgcgtgcacgacctagtaaagtcaatgctgcctcgcgcgcgttttttccgcaatataatacttgataaatttcctcggttattggcatttcaacgccgaagcgatgcgccagttcgcggacttctttcgtattgcggtagccttccaccacctgaccaatcttctcctgcgcgctttgtacatccatgccctgaccgagcatcatgccaaaacggcggttacggctctggttgtcggtacaggtaagcaccagatcgccaagccccgccatgcccataaaggtggcagggtcggcacccagcgccgcaccaagacggctcatttcagccagcccacgggtgatcagcgccgtacgcgcattcgcaccaaaaccgataccgtcggacatccccgcaccaatggcaataacgtttttcaccgcgccgccaagctgcacgccaatgaaatccggattgctgtaaacgcggaaacttttgccgcagtgcagcagctgctggagatcatcggcaaaggtctgatcggtgctggccaggctaatagctgtcggtaaacctgccgccagttctttcgcaaacgttgggccagagataaccgccagcggaatttgatcgcctaaggcctcacgcgccacgtcctgtaacagacgtccggtttccgcttccagccctttggtcgcccacaccagacgcgcatcaggacgcatcagtggtttaatctggcgcagcacttcaccaaagacatggctgggtacgacgacgagaatattacggctggctgccagcgcagtggcgagatcgctttcaagatggagcgtatcgggaaaaggcacatcggggagaaacgcggcgttacagcggtcgcgttcaagcgttgcgatatgttcagggtcatggccccagaggacaacctcgtggccatttcttgccagggtgatggcaagagcggtgccgtagctgccggcaccgatcacagtcatactagcattacgttggttcatcaggcatcctgatgttcttcagtaccttcgccagcctgctgctgcaaatagttcatgaacagcgcatcgaagttaaccggcgcaaggttcagttgcgggaatgtaccgcgggataccatgctggtgatgcactcacgagcatacgggaacagaatgttcgggcagtatgctcccaggcaatgcgccatctgggtgccttcgatacccgcgatggagaaaataccgccctgctgaacttcacacaggaacgcggtttcttcgcccaaagaggccgttacggtaacacgcagtaccacttcgtatacgtcatctgccagttgggaagatgccgtatccagatcaagtttaacttctggttgccaatctttctggaaaacgtgcggcgcgttcggcgcttcgaaagagatatccttggtataaatacgttggatctggaaagtcatttcagtgttgttttgttcactcatgtgtagaaaacccttaagtgttgtccttaaatactgcgcaatgtaatgccaacgttcacacgttatttcagcaggggatccagtccaccacgtgcatccaatgcatacaagtcatcacagccgccaatgtgctgtgcgtcaataaaaatctggggaaccgtggtgcgaccgctgcgtttgatcatctcttcacgcttggcggcgttgccatcgatcggcagctcctggaaactcacgcccttgctgctcagcagtgcttttgcacgatggcaatacgggcaggtttctttggtatagatttcaacattggccataaattagctcctgtttttttaccctgaaatttcatgttgcagggcggcagcaaaatggagtgtccccagaagcttataacaataagtcgctgggggcctaattgcagctaacggcctgcatcatgaaagacgacaggtaaattatttgccgcgcaccaaaggcaagttttcgccagcccagccagcgacgccttctttcagcacgaatacttgcgcaaaaccagctttcgtcagtgcgtttgcaggctcctggcactgcatgccagaaccgtctaccacgataaccggtttgtctttgtgcttctcaagctcaccaacattgttggctttgatttcgctcggcaacagattaatagaacctgcgatatggcctttacggaagtcatcacgctgacgtaaatccacaaccacagcgtcttctttgttgatcagacgcgtagcttcaccacgagtaatcaccttcactttgctggtcaggctcttaaacgtagtcacaagaaccgccaccagtaacgcgatccaggcgatactcagtatgggatgacggccaacaaattgcataatttcttgcatggggggtaacaactcccgacgtagtgattaaaaaaaccaggaaaggagtatacctgcgcggtgcggcaaatacagccagcgcgttaactggaatgcaattttgcggggcgcgacgaaaaaaaagcgtaaatctggcatcggcttgccgcgagcggtcgtatattttgatcttcagaggctattttatcgattcagctgtagtaaaattacgcaaattttgactcttgagtatgaggttgtcgcaatgttggtttctaaaaaacctatggtactggtgattctggatggctatggctatcgcgaagaacagcaggataacgccatttttagtgctaaaaccccggtaatggatgcactgtgggccaatcgtccgcataccctaatcgacgcttccggtctggaagtcggtctgcctgaccgtcagatgggtaactccgaagtaggccacgttaacctgggtgccggccgcatcgtgtatcaggacctgactcgtctggacgttgaaatcaaagatcgcgctttctttgctaatccggtgctgactggcgcggtagataaagcgaaaaacgcaggcaaagcggtacacattatgggtctgctctccgcaggcggcgtacacagccacgaagatcacatcatggcgatggtagaactggcagctgaacgcggcgcagaaaaaatctacctgcacgcattccttgacggtcgcgacactccgccgcgcagtgctgaatccagcctgaaaaaattcgaagaaaaatttgccgcgctgggcaaaggccgcgtagcgtccatcattggtcgttactacgcgatggaccgcgataaccgttgggatcgcgtagaaaaagcttatgacctgctgactctggcgcagggcgagttccaggccgataccgccgttgctggtttgcaggctgcttatgctcgcgacgaaaatgatgaattcgtgaaagcgaccgttatccgtgctgaaggtcagccagacgcggcaatggaagacggcgatgcactgattttcatgaacttccgtgctgaccgcgcgcgtgaaatcactcgtgctttcgtgaacgctgatttcgatggcttcgcgcgtaagaaagtggttaacgtcgatttcgtgatgctgaccgaatacgccgctgacatcaaaactgcggttgcttacccacccgcttccctggttaacaccttcggcgagtggatggcgaaaaacgacaaaactcagttgcgtatttccgaaaccgaaaaatatgcccacgttactttcttcttcaacggtggcgtagaagagagcttcaaaggcgaagatcgcattctgatcaacagtccgaaagtggctacctacgatctgcaaccggaaatgagctccgcagagctgaccgaaaaactggttgcggccatcaagagcggcaaatacgacaccatcatctgtaactatccgaacggcgacatggtaggtcacaccggggtgatggaagcggcggttaaagcggttgaagcgctggatcactgcgtggaagaagtcgcgaaagcggttgagtccgtgggtggacaactgctgatcaccgctgaccacggtaacgctgagcagatgcgcgatccggcaacgggtcaggcacacacggcacacaccaacctgccagttccgctgatttacgttggtgataagaacgtgaaagcggttgaaggcggcaaactttctgacatcgcgccgaccatgttgagcctgatgggtatggaaatcccgcaagagatgactggtaagccgctgttcatcgtggaataatccctccccatgaggggaaaggcgattaataccatgacacgggccgtgaaaccgcgcaggtttgcaatcaggcccatcatctacgccagcgttcttagcgctggcgtattgttgtgcgccttttccgcccacgcggatgagcgtgaccaactcaaatctattcaggctgacatcgccgcaaaagagcgcgcggtacgccaaaagcaacaacaacgcgcaagcctgctcgcacaattgaaaaagcaggaagaagcgatctctgaagccacccgtaagctgcgcgaaacgcaaaacacgctcaatcaactcaataaacagattgatgagatgaacgcgagcattgccaaactggagcagcaaaaagccgcccaggagcgcagcctcgccgcacaactggatgccgcattccgtcagggcgagcataccggtattcagctgattctcagcggtgaagaaagccagcgtggacagcgtttacaggcttatttcggctatctcaaccaggcgcgacaagaaaccattgcccagttgaagcaaacgcgtgaagaagtcgccatgcagcgtgctgaactggaagagaaacagagcgagcaacaaacgctgttatatgagcagcgcgcccaacaggcgaaactgactcaggcgctgaacgagcgtaaaaagacgctggcagggctggagtcttccatccagcaaggtcagcaacagttgagcgagctgcgcgccaacgaatcccgtctgcgtaacagcattgcccgtgcggaagccgcggcgaaagcgcgtgcagaacgagaagcacgtgaggcccaggcggttcgcgaccgccagaaagaagcgacgcgcaaaggcaccacctacaaaccgaccgaaagcgaaaaaagcctgatgtcccgtaccggtggtctgggcgcgccgcgtggtcaggcattctggccggttcgcgggccgacgctgcatcgctatggcgaacagctacagggtgaattacgctggaaaggtatggttatcggtgcttctgaaggtactgaagttaaagcgattgccgacggtcgggtgattctggctgactggctgcaaggctacggtctggtggtggtggttgagcatggtaaaggcgacatgagtctttacggctataatcagagcgcactggtgagcgttggtagccaggttcgcgcgggccagccgattgcactggtgggcagcagtggcggtcagggtcggcctagtctctatttcgaaattcgccgccagggtcaggcggtcaatccacagccgtggttgggaagataagttttgtttccatttcgtcgtaacgttcttgcatttgccgctctgttggcgctctcctcccccgtacttgctggcaaacttgccatcgtcattgatgattttgggtatcgcccgcacaacgaaaaccaggtgctggcgatgccttccgctatctccgtcgctgtattacccgatagtccgcacgccagagagatggcgaccaaagcgcataacagcgggcacgaagtgttgattcatctcccgatggcaccgttgagtaaacagccgctggagaaaaatacgctacgcccggagatgagcagcgacgaaattgagcgcattattcgtagtgcggtcaataacgtgccctatgccgtggggatcaacaaccacatgggcagcaagatgacctctaacctgtttggtatgcagaaagtgatgcaggcgctggagcgttacaatctttacttcctcgacagcgtaaccatcggtaatacccaggcgatgcgcgccgcgcaaggcactggcgtgaaggtgatcaaacggaaggtattcctcgacgatagccaaaatgaagcggacatccgtgtgcaatttaatcgcgcaattgacctggcgcgtcgcaacggtagcaccattgccattgggcatcctcaccctgcaacggtacgcgtgttgcaacagatggtttataacctgccgccagacattacgctggtgaaagccagcagcttgctgaatgaaccgcaggttgatacttctacaccgccgaaaaacgctgtgcctgatgcaccgcgtaatccgttccgtggcgtgaagctgtgcaaaccgaagaaaccgatagaacctgtttatgctaatcgcttctttgaagtattaagcgaaagcatcagccagagcacgctgatcgtttacttccagcatcagtggcaaggctggggcaaacagcccgaagcggcgaagtttaacgctagcgcaaattaattagcgcaaattaaaggcgctacgcgtaatgcgatggtggctccgcgttttgtcgcgccattgccataagcggaaagaccacagtaacgcctggtaaccgaccttcacgctgcgcacattggtaatcaggcgcttatacataccggaagtaaatatctcggcaatcatccgttggcgggtaagaatatccggctctttgcgcaccgcatggcaaacacgcaatgcctcgtaagttatttgctgatgaaattccggataaatcataattttgtcggcataatttcgatttaatttctccagcaggcgggtaatcttaatatagtgacgttgataattaaggtttttattcccttgtctatgcaaccgactcacactcgtattatgcagataatatttatataaactttgctcggtatatcgcgcacgcagcgcgttaaacatgaattctgttgtccagacaatatcctgatgatgtaatccggcaataaatttaatgttatttttaacaataacatcacggcgataaacccccatccagacaacgtgagtccaacggcggctagaaagccccatccgcagccagtccgggccggttaatacgccggtactgcgaaggcgatcggtggggatggattgccaggtttctcccgtttcacgaaaacaccagtcagcgttgcactgcgccacgtcgaggtcgtcctctaacgccatggtcatcagcgtttcgtacatggtgggacagacttcatcgtcagcatcgacaaaagcgacatatttgcccgttgccacttcaatcccacgattacgcgccacgcttgcgccagcattcgcctgatgcaacaaacgaacgtgcggatagttttctgcgtaatactttgctatttcaacagaattatccgtactaccatcgttaataataatgatttccagagcagtccaggtttgcgtaattaaagattccatacaagtgcggaaatcatcgcccgcattatataacggaataataacactaagtttattggtgctgttcatcataaattaccgacgacctctgaagttatcctgacgttttacaggctttgtattaagaaactattaagcctgtgagatattatttttacaggtgagagagtcacttcagggtagagagataatgagagcagctatataagagatcagcacaattacgaactctttattacactgacaggattttacatatttaacagattatcctcagataaaagggctggaataccagcccttgttcgtgttaatcccagctcagaataactttcccggactggccgctacgcatagcgtcaaagcccttctggaaatcatcgatagagaaacgatgggtaatgatcgggctaagatcgaggccagactgaatcagcgccgccatcttgtaccaggtttcaaacatctcacgaccgtaaatacctttaatgaacaagcctttaaagatcactttggtccagtcgatagacatatcagacggcggaatacccagcatcgcaatacggccgccgtgattcatggtgtcaagcatggtacgaaacgctggcggcgcaccggacatttccagaccgacatcaaaaccttcggtcatgcctaactccgccatcacgtcattgagattttctttggcgacgttaaccgcacgggtgatacccattttacgcgccagctcaaggcggtattcgttaacatcagtgatcaccacattgcgtgcaccaacgtgtttcgccaccgccgctgccataataccaatcgggcctgcaccagaaaccagcacatcttcgcccaccagatcaaagctcagcgcggtatgcacggcgttaccgaagggatcaaaaattgcggctaagtcatcggaaatattgtcggggattttgaaggcgttgaatgccgggatcaccagatattcggcaaagcagcccgggcgattaacaccaacgcctatcgtgttgcggcacaaatgggtacgaccaccacgacagttgcggcaatgaccacaggtgatatggccttcgccagaaacgcgatcgccgatcttgaagcctttcacttcctgaccaatacctaccacttcaccgacatattcatggcccacgaccatcggcaccgggatggttttttggctccactcatcccagttatagatgtgaacgtcagtcccgcagatggctgttttacggattttaatcagcagatcgttatgcccgagttccggtacaggaacgtcggtcatccagatgccctcttccgctttcagtttggataacgctttcatctcacatcctcaggcgataacgcccagttgtttaccaatacgcgtaaatgcttctactgcacgcgtaatttgctcaggggtatgcgccgcagacatctgggtacgaatacgcgcctgacctttcggaacgaccggatagaagaaaccggtaacgtaaatgccctctttttgcagctcacgggcaaatttctgcgccactaccgcatcaccaagcatgaccggaataatggcgtgatcggctcccgccagggtaaagcccgccgcgctcatttgctcacggaactgacgcgcgttcgcccacagacggtcacgcagttcgctgcccgcttcgaccatctccagtactttgatggacgcggcaacaatggccggtgccaggctgttggagaacaggtacggacgagaacgctggcgcagccactcaaccacttctttgcgcgccgcggtataaccaccagaagccccgcccagcgctttaccaagcgtaccggtgataatatcgacccggcccatcacatcgcagtattcatgggaaccacgaccattttcaccgacaaaaccgaccgcgtgggagtcgtctaccatcaccagggcatcatatttatctgccagatcgcaaacgcccttcaggttggcaatcacgccgtccatactgaacacaccatcggtggcgatcagcacatgacgcgcaccggcttcacgcgcttctttcagacgtgcttccagctcctgcatatcgttgttggcatagcgatagcgtttagctttgcacagacgcacaccatcaataatagacgcgtggttcagtgcgtcggagataatggcgtcttccgcacccagaagcgtttcaaacaggccaccgttagcatcaaagcaggaagagtagagaatcgcatcttccatccccaggaaggccgccagtttttgttcaagctctttatggctgtcctgagtgccgcaaataaaacgcacgctagccatgccgaaaccgtgagaatccattcccgcctttgccgccgcaatcagatcaggatgattcgccagcccgagatagttgttggcacaaaagttaatgacgtggcttccatcagccacagtgatatctgcttgctgcgcagacgtaataatgcgctcttctttaaacaacccttccgcccgtgcggtttccagatcgttggttaactgctgataaaattctccacgcattgcgattctccagacagggcaaattccagcacatattacccaaacttataggtcgcgacgagataacgcgttaacacttctgcaaaattcaggataaataacgtgtaacttgatgtctctcaacacctacagatagtagaaaaactgtacagttttggctgggcataatgatgattgattttactgcattgatataaaaagaaaaaatgatgccaaagcatcatttttcctatctcagttggtatcaaaacgctacccactaatggagggaaacttattttctactaaggaaaattctcagcgcctgcatttttgcccctaaagtgttactcctgaagcagcgaaacaaatcgaaccattttcctctccccagatagtttaggttgaagagatcggggcgtttgtaatagcacatgacaaaaatgccctggtcatcgtccacaatgttattatttagtgttattttttgactttccagaactaatttatagaattctttccatttatgctgactaccaacaattgcgcccccaataatatatacatgattgccaatcatgaaatcaaaaacctgttgttgagatgtgacagtaagccctttttttatagtgaaaagatgcatcttactttcatcaaatgggaaatcccaaattttcaatcctcgagttacatttggcttatggcaatagccaaaatctatccacgcaacaagaggcgttttcactaagcccatgttgatagctttatttacaaaataggccttaaggttacataccaaaacatactctggactccagtactctgggttttttaattgtcgaggctcaagtctatttgtaaagctctcatctttttgaattttttcgatacgacttctgatatatctaaatttcttttttatatcgataacgataaccgttgttggttttccgttgcgaatcgcttcaacccttggtttcaaatcgggagaagtgaaaataatcatctcattttcaagtgcggccagacgctcaaagtaactaaaataaacatcaacactacgagctagtttttcacggaaccctttattagcagtccaatcccctctaccaatgtcaaaatatgcagtgataattgtggtggaacttttcattactaataagaccattaatataaaaaaagaattatatcataaatattaatagaatgtatactgtatattatccattcaaatgcttccgttatttatcatacatcggaatattgatactaaagcactattcacatgcaaaaccaacatccgccatgaaggactagctaaaacccaaactagtttgttgcaattagcatccttgcacctctatgtaaagggctgaagggattcggatgtgatggtatgattacagacattcgtgtctgagattgtctctgactccataattcgaaggttacagttatgatcatcgttaccggcggcgcgggctttatcggcagcaacatcgttaaagccctgaatgataaaggcatcaccgatattctggtggtggacaacctgaaagacggcaccaagtttgtgaacctggtggatctgaatatcgcagactatatggataaggaagacttcctgatccagattatggctggcgaagagttcggcgatgtcgaagcgattttccacgaaggcgcgtgctcttccaccaccgagtgggacggcaagtatatgatggataacaactatcaatactccaaggagctgctgcactactgcctggagcgtgaaatcccgttcctgtacgcttcttccgcagccacctacggcggacgcacctccgactttattgaatcccgcgagtacgaaaaaccgttgaacgtctacggttacagtaaattcctgtttgatgaatatgttcgtcaaatcctgcctgaagcgaacagccagattgttggcttccgttatttcaacgtttatggaccgcgtgaaggccataaaggcagcatggcgagcgtcgctttccatctcaacacccagcttaacaacggtgaaagtccgaagctgtttgaaggtagcgagaacttcaaacgcgacttcgtctatgtgggcgacgtggctgatgtgaatctgtggttcctggaaaatggcgtttccggcatcttcaatctcggtactggtcgtgcggaatccttccaggcggtagctgatgctacgctggcttatcacaagaaaggccagatcgaatacattccgttcccggataaactgaaaggccgctatcaggcgttcactcaggcagatctgacaaatctgcgcgcggcgggttacgacaaaccgttcaaaaccgttgctgaaggtgtaacggaatacatggcctggctgaatcgcgacgcataagagctctgcatgaaaatactggtgatcggcccgtcttgggttggcgacatgatgatgagccaaagtctctatcgcacgctccaggcgcgctatccccaggcgataatcgatgtgatggcaccggcatggtgccgtccattattaagccggatgccggaagttaacgaagctattcctatgcctctcggtcacggagcgctggaaatcggcgaacgccgcaaactgggtcatagcctgcgtgaaaagcgctacgaccgcgcctacgtcttacccaactccttcaaatctgcattagtgcctttcttcgcgggtattcctcatcgcaccggctggcgcggcgagatgcgctacggtttactcaacgatgtacgcgtgctcgataaagaagcctggccgctaatggtggaacgctatatagcgctggcctatgacaaaggcattatgcgcacagcacaagatctgccgcagccattgttatggccgcagttgcaggtgagcgaaggtgaaaaaagttatacctgtaatcaatttagccttagtagtgaacgtccgatgattggtttttgcccgggtgcggagtttggtccggcaaaacgctggccacactaccactatgcggagctggcaaagcagctgattgatgaaggttatcaggtggttctgtttggcagcgcgaaagatcatgaagcgggcaatgagattcttgccgctttgaataccgagcagcaggcatggtgtcggaacctggcgggggaaacacagcttgatcaagcggttatcctgattgcagcctgtaaagccattgtcactaacgattctggcctgatgcatgttgcggcggcgctcaatcgtccgctggttgccctgtatggtccgagtagcccggacttcacaccgccgctatcccataaagcgcgcgtgatccgtttgattaccggctatcacaaagtgcgtaaaggtgacgctgcggagggttatcaccagagcttaatcgacattactccccagcgcgtactggaagaactcaacgcgctattgttacaagaggaagcctgacggatgcgggttttgatcgttaaaacaagcagcatgggcgatgttctccatacgttgcccgcactcactgatgcccagcaggcaatcccagggattaagtttgactgggtggtggaagaagggttcgcacagattccttcctggcacgctgccgttgagcgagttattcctgtggcaatacgtcgctggcgtaaagcctggttcagcgcccccataaaagcggaacgcaaagcgtttcgtgaagcgctacaagcagagaactatgacgcagttatcgacgctcaggggctggtaaaaagcgcggcgctggtgacgcgtctggcgcatggcgtaaagcatggcatggactggcaaaccgctcgcgaacctttagccagcctgttttacaatcgtaagcatcatattgcaaaacagcagcacgccgtagaacgcacccgcgaactgtttgccaaaagtttgggctatagcaaaccgcaaacccagggcgattatgctatcgcacagcattttctgacgaacctgcctacagatgctggcgaatatgccgtatttcttcatgcgacgacccgtgatgataaacactggccggaagaacactggcgagaattgattggtttactggctgatagtggaatacggattaaacttccgtggggcgcgccgcatgaggaagaacgggcgaaacgactggcggaaggatttgcttatgttgaagtattgccgaagatgagtctggaaggcgttgcccgcgtgctggccggggctaaatttgtagtgagcgtggatacggggttaagccatttaacggcggcactggatagacccaatatcacggtttatggaccaaccgatccgggattaattggtgggtatgggaagaatcagatggtatgtagggctccaagagaaaatttaattaacctcaacagtcaagcagttttggaaaagttaagtagtttataaaggtaaaacatgctaacatcctttaaacttcatagtttgaaaccttacactctgaaaagtagtatgattttagagataataacttatatattatgtttttttagtatgataattgcattcgtcgataatactttcagcataaaaatatataatatcactgctatagtttgcttattgagtctaattttacgtggcagacaagaaaattataatataaaaaaccttattcttcccctttctatatttttaataggcttgcttgatttaatttggtattctgcgtttaaagtagataatagcccatttcgtgctacttaccatagttatttaaatactgccaaaatatttatatttggttcttttattgttttcttgacactaactagccagctaaaaagtaaaaaagagagtgtattatacactttgtattctctgagttttctaattgctggatatgcaatgtatattaatagcattcatgaaaatgaccgcatttcttttggtgtaggaacggcaacaggagcagcatatagtacaatgctaatagggatagttagtggcgttgcgattctttatactaagaaaaatcatccttttttatttttattaaatagttgcgcggtactttatgttctggcgctaacacaaaccagagcaaccctactcctgttccctataatttgtgttgctgcattaatagcttattataataaaagtcccaagaaattcacttcctctattgttctactaattgctatattagctagcattgttattatatttaataaaccaatacagaatcgctataatgaagcattaaatgacttaaacagttataccaatgctaatagtgttacttccctaggtgcaagactggcaatgtacgaaattggtttaaatatattcataaagagtccttttagttttagaagtgcagagagtcgcgctgaaagtatgaatttgttagttgcagaacacaataggctaagaggggcattggagttttctaacgtacatctacataatgagataattgaagcagggagtctgaaaggtctgatgggaattttttccacacttttcctctattttagtctattttatatagcatataaaaaacgagctttgggtttgttgatattaacgcttggcattgtggggattggactcagtgatgtgatcatatgggcacgcagcattccaattatcattatatccgctatagtcctcttactcgtcattaataatcgtaacaatacaattaattaagaataaacaagtttaagaagtgagttaaaactcacttcttatctatacaacttaatctctttacactattagttaaagtttcagtatcgatatcttttaccgtatatgttggggatactatttgtatagatttatgatgattcggggaccaaattaaatggctgggatattccggagtacgactattagggtaaaatgcaagcgttggtttatgataagccgcagcgatatgaacaagagctgtatcaacagaaatgacaaaatcactatacttggtcaacgcaacggtataaataaactcatcaaatggtagtgtttcgatttcaagtattggtattgtcaataaatcttgcggtaacccggtaaatataatccgataattttcaaagtgtgttttcacttcttgatatataacttttatttgctcaaacgtaagacggcatattttttttgcacctaatggattaataatgactattcttgtatctccaataaattcttttattttatcttcaacatctactggtaaatgcaagtcgtagttggtggaaaatttaccctcaccataaatatgcttcagtatttctattgctcgtgtactcatatgttcttttaaacattcatcgtggggatggtaaaaactatagtaacgcttataccaatgatcaaaacccagaatgtaagaatcttttaaactacttaatattaagctatgcttaaaactgggcatagtttcaaaggggtctaatacaatatcgaactgtaaatcccgcagatgcttacatagagtaagcatttcaagaaaaccggtactttctttaatacagaactcaaatatatttttattattagagagaaattccccaccctttctatttgtgagaagagttattttaacccctttactataaagttcacgataaatgctacttaatacaattagatcaccaagtttattattatcatgaataataaggcaacttttaacttgtgctggatctgtaatttgattatttattttattacgaaataaaaaagaaaggaaattaatcttgattttgtttatataaaatcttttctttttgtgaaaagttcctaagcgcatttttataccatattattttagtttcaggatgattaattagcataagaatcggtactagttctatattgcattttttttcttgtcatatctttactttcttctgcactgatgtcttgaagtttaataaatggaattacatcgtaagaaatagctgtatcatcacttaaattataaatattaatatcttttacattatcatgcataaaacgaaaaaatggcaatattttgaataaatccctacttaattcgctgggcatgggatttttattctcatcatagaaacgagaacagctacccgttaaatcaagaccagaacaaataatccgcgcatacttaagactatatgcgatttgaattgcagcaaaggcaatagtatggcaactgcaataaccaagactaatgtccttgcaaaatccaaccagacgaccttttttagacaacggtacagagatcagcagttctttgtgaatctgtctcaaaatattaaatttaatcttctttataaaaccacctttttcccgacggtaaaaggaccgtaatacgaggcagttctggaggatataaagtttatcttctttggaagcgtgttcataaacgtcaacgtttactatggtataacgacttctctggctaaatttataaaaatcatcacgacgctgatgtaaaaatcggacatctgtaagtacatatataaaaggaacgatattattacttaacagatattgcgcagaaccattgacagcaataatatcctttgttcgtaatacactcaaaggtgttttttggcttgtagggccgctaagaaaaataataacatcatcagatattttattttcaatcaggttttcaacatcttttttgtcaatgtatctaatattcttcatgataaacctgtgaaataaataactccgcttaaaactgtcctggtgaagacatgtaattgtgggattttttttagcgcgctggtttccctttcaaacgccgcataaaattgcgcatttttttacgatatactaaaagataatagcctagatctctaatctcatttttaataccgtaatgacgctctaagtcaatacgatctttcgctttacgctgcgcactagcacgctttccggagagatcgataattcgaacctcaccattttttataatgaagttaccacgatgggggtcgccagaaaccatgccatgttgatgtaaggcattaatactttgctgaattttattttttagcgcatcatcaatatcgggcatatcacacaactctatgccatcaatatactcgatgatcatgatataagtatggacaaaacgtaaggttttccgttcagccaataaataaaagtcattgagtgtatttaacccttcatttcgtactttttgggtttgctcaaaaaggcgttcgtaataatcaccttttaacagagacttaaagaaacgttcgttacgcttaactttcggagaaaaaaccttaagaatcaatttaccgtaatcggtatcaataagcataacttttgtatcatcaatagaacgaaaaaccttgatgatatttatattataagacaagaagtcatttaatacattgaggtacttactattgttttcatcggtaaaaacaaccaagtctttgatcttgctcttctgaatcataataaaccagttaaatgttatttacggtaatattttcggcaaagataacagactcctgctataattcctgagatataatgatgttgcactaaaagatgtttatatcttttttaaattcaataattgatttcgcatctcgtggagagtcatctttccagggggaattttctaaagctattttatagtattttaccgatggataaattgcccatttgtgccacggtttagttgcacctgtataatgaataagaagagtactttctgtaatcagctttttatagttttgatgtgttttgtcttttaattcacttttaattgtataaattgtattgtactcacgaggcaaaaataatgtcatccctttcagtaagacattcataacatcctgatcagggtatttataaacattatctttactcataagaatagacaacgctttttctgttagttttgcgtcagcccattttcttaagtctaaataaacgacaccggaattaaagtactgcccaagtaattcaggatcagacaacctggataccgccttttcttgcattggctcaacatctttaacaacagcagcaaccgctccatttaaacccagatgtaatagttggctaatatcgcctttacaaacaacatctgcatcaagataaagcaaacgatcaagcgttaaacccaataattgaaatgcaaataaacggaagtacattgctcttgaccagacctgtgtacaaggcaagcactggagcttatcagtgttaattctatataacgtgattcttaattggttttgctctgcaagctttgcaattttttgaaaaaaaccatcattataaacatcagcaataatataaaaatcaagattaatatgtcgattatttaggacaattgatgtgatggaaacacctacaccatcaagataattagcatcgacaccataggcaacatttaaacattcagaagtatttatattagctagccgaaaatcccaggctttaactttatctatctctatggcaggaaatgagtccacaatgctacccttatatcattactttatagtttcccagttttaatgctttatcttttcaataaaataaaaaagatagttgctaaatccttttagatatctatgctttttaagcatatgttttgcgctatatcttaattgattgctattgttcggtttcagcaacgccgtattcttccatgggctagcattttttgcctccataaaggcttgacttacaggataatcccaggcccaatcatgccagggcttggttggcccgatataatggataaaaatagtatcgttggttactgggtttataaagctttctttgagttgataatttaagctgaactgggtgttatatttaatatcagcgaaaataagtttatccgccagcaacatatttaacacatcctgatcaggatgtgttatttttttgattatttctggctcatttagcattgcaatagctcgtgcagaaacctgctgagccgcccattgggcagtattaatcaataaaaaaccggagttaaagtaacctttagcaattcccgcaacacctaagctatgggcgcgtttttcccaccagtcagcttgcccttctgtaacaaccattgcgactttatcgtcaggaaaactgaaattaattagtggctcaatagtcccctgacaaatgatatctgcatccagataaaggactttaggcgccttattaataaagtaatctgcaataacaaaacgaaaatatattgcatgagtccaattcttagtgctaggcaaactgcgcagtcgatcaccattaatcagatatattttaattctggttttatactgcaacgccagggcatcaaaatacttacgatcatcatcaccaaaataatcagtaaaaatatggaaacacaatcgacttccttcattatattttaatatactagcaatgctaattccgcaaccaaatagaaagtttttgtcagttccataagcgatgtccagacaaagattttctgtttctactttatgatcataatcaataacactattaagaaactcagtttcctggaaaaacacctgctgcattatttcctccgggaaatagcagaaataattaccttatgtaatctatcgtaatacttgctttggtaaaattcatcgatgctcgcaggaattttttcatgttcgatatgaatttcacctgctatatatttatttagaagagttacaaaaccagcaatatctcccggttgatacagatggccattgacatcaggttgaataatgtcagcaggcccggagacacaatcggcactgatacaaggaatcccccagctcaaggcttcaagtagggtcattgggaaaccttcaaaagaactcgtgagcaataacgcactcactttttcaatatcttgctggaccaattcccagggatattgttgccaaccataccagacaattcgatcatcaatatttaattctctaccataagcctggcatttttcgaaatcggagccatcacccaatacatggagtttccagttacctttcgcttgacttaagccatcaagcaggtctttaactcttttctggccttcaaatttcatacgcccaacataaataaacgttgccgtttcaccttcctcgggcgcgggaatgacactgtctttagtttcgacgggattaaaaataacatttatcgtgctttctgctacacctcgattaatcatttgctgtttaatgccagagctgattgctaaatgatagtcggcacaggtgatatattcagcatgttttttgtgatctaaagaaaaatgtggccaactaaatactggcatatcaattccactttttttacgtgcttttgcggcaaacaggcaggagatcacatcaatacaaataacgatatctggttggtactcctgaagccatttacttagagcatgaatatgtttcgcccgacgcaaaaaacctaaacgaatattggaaaaactacaactgtatttaataccttccagccatcccttatccattttgtcattacgacaaaagaaaaacatttcactttggatatgttgttgcctgaaggtagtaataacatcacggatgacagtttccatgccgccaaatccagaaacagcttcgccgataaacgctattttcatagaaactctcattaattgagtaaaactcactgttttaacggttttatttgtctataaaatcagaaacaatcgtactcatcattttatctggactgaatttatataaactatcataatccattggtttaacagaactgttaataaaatactctaacttatcccaatcatcatgacctattataaaaaagcgagattcactatagatttcactaccaaatacatttatattattagtaattaattttttattgaaaaatagtgcctcaagtatacgaagagtccagccagattggttttctttggttatatcaacaattatattagcatttaatgttcttctaatattctcttcataagatatttgtttttcaatcaaatacttactagtcgtagaacttgtcttatctttgacaacattaaaatctagcttacatcctagtgttgttaatctctcggctaactcattaattatttgaagacgccctttatcacgaccaaggaaaaaacatattggctggctgttatttttgtcagataaactataatttctaatttcatccattcctataggaaaaaattgttctattgccttgatcttttcattccctataaatctatgctcaaaatcatatataatatcgaaataattcgcgttatcaagaataaaatcttcgccaacagtatttcttagaagcaaaactttatgacagttaatattttttaatatttgtttattgatacctttattaacaacactgtcattaatgataattatgtcatcttttttaatatcattgaggtaatgcttgatgaataatcgccccagccatgcattatccatccctattttacttatttttttattaatccagttatatttttttggtgttgttatattttttatcttgtacttttttttcaggtactgaatcatttttaattcataatctgcaacccaatttataaaataaatagtcataataaagttagttccagtacatactaataaatatttttataatcctttgcgttgtgttcgctctttaatacgctcggccttaacgcttgccatgttcaataaattctgttcaagagacaatattttgcgtaaaggcatcccaaaataaaccttcataaatcgccagatatctctttgcgtcaggccaatattcatactactgaaatataaaccaatcaggtctttatcgcgccagcggcgcggtacttttgcacgtatctgtgcccgatgcagatcgataacactaatttttaattcatcttcccggccagtaaatggcaaatgaagcaaaaagtggcaaatgtaacagtcgcggtgatttatccctgcagtatgcattttacgcaccatagttgctacacgtgcgatcagcatacgcttaacacgtatatcaggcgggttgactgcccaatcggcacaataatcttcaaggctaattgtgggagtgagatcttcggtaataataaaacttgcgcgagttaatggatttaaccctttttcgccaaacccaatgcccttcattgtatcaacgccaacatcactcaggcgatgaatagcgtgccactctctgtctgcgcccaaaacgggcatccgcaaactgagtagattttttataatctcttttaatgtcgtccccttgtgccatttaagaaaatagcttttcccggacagttcaaagcgtaatgtacgacgagtctccagttcacgaaagacctcgccgttcagttttttgacctctgcaaaagcatctttaccacgccaaagtgtggcaagcggctcttttaattcaaccatctaaaccacctgtaatgatatccgcggctttttctggcaagctatacaaatcctgagtatcggcataatggcgagcattctccgcccaggccattcgcaatgggctctgagttaacgctttacgtaaaacttcatttaattgttcctgagagaaaggttcagcgatgaccgttccacaattggcatccgcaatataatgcgcgtacccacataccgctgttgttaaaacaggtaacccagcagtgatcgcttctagaagaacgatacccgcggcttcctgataagcgggatgcagtaataaatcagcggctgccattaattcactcacatcattgcgaccgaagaagaaatgcacattgctccgcacgccgagtttttctgccagcgcttcaaattttcgcggcttatcctgaccaacaacaaataaaagcgtattgtgacgtaaactttccggtaagcttgccaaagcttcaatactgcgatctacacctttacggccaaaatcacttccaacctgcagtaataagttttgttgctcttttatgccatttttctggcgataaatttcacggctgtttgggatttgctcactgtattttctgtccggataaataccgggaggaagaatttgaaaacgttcaggttcagtttgataatgcttctggaaatcggcgatttgcttatcggtcagcatcataagtttcgtgcttttaccctgctcgaaagtcgctcgctcaaatgcggcataatggcgatatcgacttgttaaacgatataaaaaacctttttcttgcgcaactttctcggcgtaacaaacatcagcggcaaaataaacatccaggccaggcatcttattaaacccaacaacgcgatctgcgggatgctctttgagatgattttgtacccaggcataatattctgcattgcgtccatggttggtatgggacttaactggcacctgaataagctcaaatgctttcgggcaatcgccttcccagctctgtgtatatacccgaacatggtggccccgtgcggcaactgtacttgcaatgcgcataaagtcacgttgaagcccaccaaatggaaaatatttatataaacaaaacgccacgatcataattgtgcattcctgtcagcactaggggcatcttctggcaacagcttttccgtagcggcgatcacatcctccgctgggataacagaaagatattttttgttgcggtcaagttcatgccgggtcggcattttctgataattccccgcccagaattgaataatattctcggtccagggacgccagaatacgtgatccgttgcaccaaatagactaatgactggcgttttcactgccgctgcaatatgtcccggcgcagaatccacaccaataaaaagcactgcatgatcaattaatgcacccagttcaggaaaacgtgttttacctgcaaggccagtaatgggttttgtttcgcaacctcgtgcaatctcatctacacaagcgagatcatctgcgctgggcccacaggttagcacaacctgatagcctcgctgttgcagcgcatcgataaccttagaaaatttatcgttatcccaacacttaaatatctgacgcgctgtcggttggatgacaacataatgatcttttacgcccagggcatctaattcccggcgcatcttcttccagcaatcttcggcgtaactcattgttgtgtcggtgtagaaatcggtaatacctaatggctcaaggacgcttaaattacgctcaacaatatgtgtaccgtgtattggcgctaagtgtgtgaagctttttttccaaataccatgctgccgatgaccataaagttggcttattttcatccgtgcaggtaaacaacgtaccagcagcgccaccatccactgatccgtaagattaatgaccaggtcataattattcgcacgcagagtttttatcaagctaagcacatttttaattttatcgaaagttcccgcacctttattgcttatcccatagagcgcattaatttccgggttttcagacaaaatagggatggtgtcctgataaagcagcatatcgatttttgcatcaggataattctgcttgagcgtactgatgacaggagtagttaataacatatccccatgatatcgcatctttatgaccaggatttttcgaaatggcttttccactagcgactcttttgtgtgattgtctggttaagttaagcagaaaaaagcacgctaccgccccaggctcaacagctacctgaatactgataacgcacttactttgacgtgctagtgtatcatttctttcgcagcaatccgacccgaatgatttttatacacaaaatatactttaatcataaaaatcaaatagataaaaaatagcatttcgataatgtcagtacggcctatgtagatttgaaaatggggccgagtttcaatgaatcgcataaaaatacaaaaaaaatgaagatgtagcggcagatcagaccaaactgaagctatttaagtcaaaaacgggaaaagtaatggtaaagccacagctaaatacatagaatccccagcacatccataagtcagctatttactatgctcgaattgctttacaccgcccttctctaccttattcagccgctgatctggatacggctctgggtgcgcggacgtaaggctccggcctatcgaaaacgctggggtgaacgttacggtttttaccgccatccgctaaaaccaggcggcattatgctgcactccgtctccgtcggtgaaactctggcggcaatcccgttggtgcgcgcgctgcgtcatcgttatcctgatttaccgattaccgtaacaaccatgacgccaaccggtagcgagcgcgtacaaagcgctttcgggaaggatgttcagcacgtttatctgccgtatgatctgcccgatgcactcaaccgtttcctgaataaagtcgaccctaaactggtgttgattatggaaaccgaactatggcctaacctgattgcggcgctacataaacgtaaaattccgctggtgatcgctaacgcgcgactctctgcccgcagcgccgcaggttatgccaaactgggtaaattcgtccgtcgcttgctgcgtcgtattacgctgattgctgcgcaaaatgaagaagatggtgcacgttttgtggcgctgggcgcaaaaaataatcaggtgaccgttaccggtagcctgaaattcgatatttctgtaacgccgcagttggctgctaaagccgtgacgctgcgccgccagtgggcaccacaccgcccggtatggattgccaccagcactcacgaaggcgaagagagtgtggtgatcgccgcacatcaggcattgttacagcaattcccgaatttattgctcatcctggtaccccgtcatccggaacgcttcccggatgcgattaaccttgtccgccaggctggactaagctatatcacacgctctagtggggaagtcccctccaccagcacgcaggttgtggttggcgatacgatgggcgagttgatgttactgtatggcattgccgatctcgcctttgttggcggtagtctggttgaacgtggtgggcataatccgctggaagctgccgcacacgctattccggtattgatggggccgcatacttttaactttaaagacatttgcgcgcggctggagcaggcaagcgggctgattaccgttaccgatgccactacgcttgcaaaagaggtttcctctttactcaccgacgccgattaccgtagtttctatggccgtcatgccgttgaagtactgtatcaaaaccagggcgcgctacagcgtctgcttcaactgctggaaccttacctgccaccgaaaacgcattgaggttgttatgcaaaaacgggcgatttatccgggtactttcgatcccattaccaatggtcatatcgatatcgtgacgcgcgccacgcagatgttcgatcacgttattctggcgattgccgccagccccagtaaaaaaccgatgtttaccctggaagagcgtgtggcactggcacagcaggcaaccgcgcatctggggaacgtggaagtggtcgggtttagtgatttaatggcgaacttcgcccgtaatcaacacgctacggtgctgattcgtggcctgcgtgcggtggcagattttgaatatgaaatgcagctggcgcatatgaatcgccacttaatgccggaactggaaagtgtgtttctgatgccgagcaaagagtggagctttatctctagtagcttggtgaaagaggtggcgcgccatcagggcgatgtcacccatttcctgccggagaatgtccatcaggcgctgatggcgaagttagcgtaacgtttatgccggatggtatgccatccggcgcgcatgaattacttctggcactgccgacaataaaacgttgcccgctgcgcatgtttagtcgccacaatcggcgtaccgcacacccgacacggctcaccttttcgcccgtaaacctgcaattcctgagcgaaatagcccggtttaccatcactttgcagaaaatctttcagcgttgtaccaccctgctcaatgctacgcagcaacaccgctttaatcacccgagctaacaattcacactctgccaggctcagactactcgccagccgatccggatggatccccgccgcaaacagactttcgctggcatagatattccctacccctaccaccagcttgttatccatcagccacggtttaatcgccgtttttttcttcgcgcacttctgatgcagatactcaccattgaaatcgtcgctaagcggctccggtccaagatgggtcagcacattatgcccttccagctctttggtccacagccaggcaccaaagcggcgcggatcggtgtagcgcagcactttgccgttgctcatcaccaaatccacatggtcatgcttttcagggggaagttcttctggaaggatgcgcaggctgccagacatccctaaatgaatgataatccagccctcaggcagctccagcagcagatatttagcccgccgctgcacgctaagcactggttggtcgcttaaacggtagatctcttcactaaccggccagcgcaagcgtccgttgcgcaccactgcatgaagaatggttgcaccaacgagatgcggttctatgccgcggcggctggtttcaacttcgggtaattcaggcatagcatctccaggaatgaacagatgcagtcaatatgggggcaagcagataacaaaaaaccccgccggagcgaggttttttgttacatcaaagcgagaattatttgattttcgcttctttgtagatcacgtgctggcgaacaactggatcgaattttttcagttccagtttttccggcttagtacgtttgttcttcgtagtggtatagaagtgaccagtaccagcagaagaaaccagcttgattttctcacgaatacctttagccatgatttatttcctctaagtacttagtacttttcgccacgggcacgcagttcagccagaactgtatcgatgccttttttatcgattacacgcatacctttagcagatacgcgcagggtgacaaaacgcttctcgctctcaacccagaaacggtgagagtgcaggttcggcaggaaacggcgtttagtcgcgttcagtgcgtgggaacggttgttaccggtcaccggacgcttgccagtaacttggcagactcgggacatgtctattctccaaaaatcaaattagctcgagcttcgtatggggtattggcgcctcgtcaggctttacagcccggtcatcgcagttctatgtgaactctcgattgccaggcccaaatgccaaacccgagattctcaaaggtggcgtagtatacgctgactcagcgatgtgctcaagtcccgaacagacaaagatcccgaaggatcgcgcatagcgggttaaatccagccgcgttcggcaaaagaaacatactctccacgcccaatcacgatatggtcgagcacgcgtaaatccatgaactgacaactctttattatccgttcagtaatgagtttatccgctttactgggttcagcacaaccgctagggtgattatgtgcaaggatcagcgcgctggcgtttatttttatcgcttcgcggataatttcccgaggatggacttcaacatggtttagcgtgccggaaaaaagacgcctatgcgttataacccggtgttgggagtcgagaaagatcaccataaagatctcccgctcctcacccgtgagctggctttgtaaaaattccctcgtcatctccgggctgagtaaagggctttcttcacgcatccgcacgttgtagtaacgccgcgccagttcagcaatcccctttaactgggcaaatttcgccacgccaattccatgaacgccactaaattgttcatattcagaggttaacaagccataaagagagccgaaattctccagcatctcttttgccagggttaatacatctttaccgcgcgttccggtacgcagaaatagcgccagcagctcgacatccgttaaggcgctaataccaaacttcagcattttttcgcgcggcatcaacagctgactattgtttttcaccttcacctcctttgtggtgctcgcatcctgtcatagccgtttcgttaaatcgacggccagttttcaatcctggaaagcgcctcgcaaagtgaatctcaggtgaaggcacgacaacaaaagtattgtgataaaatcgccaacttctggtgtcaccctacaggaaaaatcatcatgagcctggccggtaaaaaaatcgttctcggcgttagcggcggtattgctgcctataaaacccctgaactggtgcgtcgtttgcgcgatcgcggggccgacgtccgcgtagccatgaccgaagcggcaaaagcctttatcaccccacttagcttgcaggcggtttctggttatcccgtttccgacagtctgctggacccggcagccgaagccgctatgggccatattgagctgggtaaatgggctgatttagtgattctcgcccctgccacggcagatttgattgcccgtgttgctgccggaatggcgaatgacctggtaagcacgatttgtctggctacacctgcgcctgtagccgtgctccccgccatgaaccagcagatgtaccgtgccgctgccacgcagcataatttagaggtgcttgcttcccgtggtttgctcatctgggggccagacagtggcagtcaggcttgtggtgatatcggtcctgggcgaatgctcgatccgttaaccattgtggatatggcggtagcgcattttagccccgtcaacgacctgaaacatctgaacattatgattaccgccggcccgacgcgtgaaccgctcgatccggtgcgttatatctctaatcacagctccggcaagatgggttttgctatcgccgccgccgctgcccgtcgtggcgcgaacgtcacgctggtaagtggtccggttagtctaccgacgccaccgtttgttaaacgtgttgatgtgatgaccgcgctggaaatggaagccgccgtgaatgcttctgtacagcagcaaaatatttttatcggctgcgccgccgtggcggattatcgcgcagctaccgtggccccagagaaaatcaaaaagcaggccacgcagggtgatgaattaacaataaaaatggttaaaaaccccgatatcgtcgcaggcgttgccgcactaaaagaccatcgaccctacgtcgttggatttgccgccgaaacaaataatgtggaagaatacgcccggcaaaaacgtatccgtaaaaaccttgatctgatctgcgcgaacgatgtttcccagccaactcaaggatttaacagcgacaacaacgcattacaccttttctggcaggacggagataaagtcttaccgcttgagcgcaaagagctccttggccaattattactcgacgagatcgtgacccgttatgatgaaaaaaatcgacgttaagattctggacccgcgcgttgggaaggaatttccgctcccgacttatgccacctctggctctgccggacttgacctgcgtgcctgtctcaacgacgccgtagaactggctccgggtgacactacgctggttccgaccgggctggcgattcatattgccgatcctagtctggcggcaatgatgctgccgcgctccggattgggacataagcacggtatcgtgcttggtaacctggtaggattgatcgattctgactatcagggccagttgatgatttccgtgtggaaccgtggtcaggacagcttcaccattcaacctggcgaacgcatcgcccagatgatttttgttccggtagtacaggctgaatttaatctggtggaagatttcgacgccaccgaccgcggtgaaggcggctttggtcactctggtcgtcagtaacacatacgcatccgaataacgtcataacatagccgcaaacatttcgtttgcggtcatagcgtgggtgccgcctggcaagtgcttattttcaggggtattttgtaacatggcagaaaaacaaactgcgaaaaggaaccgtcgcgaggaaatacttcagtctctggcgctgatgctggaatccagcgatggaagccaacgtatcacgacggcaaaactggccgcctctgtcggcgtttccgaagcggcactgtatcgccacttccccagtaagacccgcatgttcgatagcctgattgagtttatcgaagatagcctgattactcgcatcaacctgattctgaaagatgagaaagacaccacagcgcgcctgcgtctgattgtgttgctgcttctcggttttggtgagcgtaatcctggcctgacccgcatcctcactggtcatgcgctaatgtttgaacaggatcgcctgcaagggcgcatcaaccagctgttcgagcgtattgaagcgcagctgcgccaggtattgcgtgaaaagagaatgcgtgagggtgaaggttacaccaccgatgaaaccctgctggcaagccagatcctggccttctgtgaaggtatgctgagtcgttttgtccgcagcgaatttaaataccgcccgacggatgattttgacgcccgctggccgctaattgcggcacagttgcagtaatatgacgccggatgacttttcatccggcgagtttctttaaacgccaaactcttcgcgataggccttaaccgccgccagatgttccgccatttccggcttctcttccaggtaagcaatcaggtctttcagggtgatgatagagatcactttgcagttgtaatcacgctcaacttcctgaatcgcgctaatctcgccgcgcccgcgttcctgacgatcgaggctaatcaacacgccagcaagcgtcgcgccattggcctgaataatctccatgctctcgcgaatcgccgttccggcggtgatcacatcatctaccagcattacgcgtccttgtaacgcgctaccaaccagattgccgccttcaccgtggtcttttgcttctttgcggttaaagcagtacggcaggtccaggtcgtgatgctccgccagtgccacagcggttgtggtggcaatcgggatccctttgtaagcagggccaaacagcagatcgaactcaatgccggaatccaccaacgcttcagcgtaaaaacggcctaacagtgccagatcgcgcccggtattaaacagcccggcgttgaagaaataggggcttttgcgcccggatttcagcgtaaactcgccaaactttaacacctgcttgctaagcgcaaattcaataaactggcgctgatatggtttcatgccttcgctcctcatcttacttttctacagacaaaaaaaaggcgactcatcagtcgccttaaaaatcagtttgccagcgccgccttctgcgtcgttacaatggattgctttcccctcgggccagagccaacaagatgagtagctcttcatgggtgaacggctcgccttctgccgtcccctgcacttcaatgatgcgcccgtcttcggtcatcactacgttcatgtcggtctctgcggcagagtcttcaacgtattccagatcgcaaaccgcttcgccgttcacaattccgacagaaactgcggctaccatccctttcatcggattggttttcagcttgccgttttccaccagcttctgtagcgcatctaccagcgccacgcaggcacccgtaatgctcgcggtacgcgtgccaccatcagcctgaagcacgtcgcagtccagcgtaatggtgaactcacccagcgctttcaaatctactgccgcgcgaagagcacgggcgatcagacgctggatttccattgtgcgtccaccctgcttacctttcgccgcttcacgagcgttacgggtgtgggtagaacgtggcagcatgccgtactctgcggtgatccagccctggccctgacctttcaggaagcgcggcacgccttcttcaatagaggcggtacacaacactttggtatcgccaaattcgaccagcacgctgccttctgcatgttttgtatagttacgagtcagggtaacgggacgcacctgattattgctacggcctgctggacgcatattgaaatctccggcttgaaacaaatgtggctgcgcattatacggacttccggcggttattcctatcctgacaaggcatcgatggctataatccttccacctctccttttataaacaggaacgtctatgatccgcagtatgaccgcctacgcccggcgtgaaatcaagggtgaatgggggagcgcaacctgggaaatgcgcagcgtaaaccagcgttatctggaaacttactttcgtctgccggagcagttccgtagccttgaacctgtcgttcgcgagcgtattcgttctcgcctgacgcgcggtaaagtggaatgtaccctgcgctatgagccagatgttagcgcgcaaggtgagctgatcctcaacgaaaaactggctaaacagctggtaactgccgcgaactgggtaaaaatgcagagtgacgaaggggaaatcaacccggttgatattctacgctggccgggcgtgatggcagcccaggagcaggatcttgacgccattgccgctgaaattctcgcggcgctggatggtacgctggacgactttattgtcgcgcgcgaaaccgaaggtcaggcactgaaagcattgatcgagcagcgtctggaaggcgtcaccgccgaagtggtcaaagtccgctcccatatgccggaaatcctgcaatggcagcgtgagcgtctggtcgcgaagctggaagatgctcaggtgcaactggaaaacaaccgtctggagcaggaactggttctgctggcacaacgaattgacgttgccgaagaactggatcgcctcgaagcgcatgtcaaagagacctacaacattctgaagaaaaaagaagcggttggtcgtcgtctggattttatgatgcaggagttcaaccgcgagagcaacactcttgcgagcaagtctatcaatgccgaagtgacaaactccgccatcgagctgaaagtgttgattgagcagatgcgcgagcagattcagaacatcgaataactcgtaacgccaattcttacttttccgccttcacaaatgccgccactcaaacagagcggcatttttcttccccgcaacattcaattctgttttgcgtgcctgctccagattttgcgatgtttttttgcccagcacactgagaacgcgagatactcacaactgtatataaatacagttacagatttactttctttgcaattgatatcacatggagtgggcaatgaacgaacatcatcaaccttttgaagagataaaactgattaatgcaaacggagcagaacaatggagtgcaagacaacttgggaaactactgggttatagtgagtatcgtcactttatacctgtattaacgcgcgccaaagaagcctgtgagaacagtggtcacacaattgatgaccatttcgaggagatcctcgatatggtcaaaattggcagtaatgccaaaagagcattaaaagacatcgtactctcccgctatgcctgttacctggtagtacaaaacggcgaccctgcgaaaccggtcattgcggcagggcagacttattttgctatccagacccgacggcaggagcttgctgacgatgaagcatttaagcaacttcgtgaagacgaaaagcgtctgtttctgagaaatgagttgaaagaacataacaaacaattggttgaggcagcacagcaagctggggtagcgacagctactgatttcgccatatttcagaatcatggttaccaggggctgtatggtggattagatcagaaagctattcatcagcggaaggggctgaaaaagaatcagaagatcctggatcatatgggtagtacagaactggcggctaatctctttcgagctacccaaacagaagaaaaactcaagcgggatggcgtgaatagtaaacagcaagcaaacaccacacactttgacgtgggtcgcaaggtgaggcaaaccattcaggaacttggcggaaccatgcctgaggagttgccgaccccgcaggtcagcatcaagcagttggaaaacagtgtaaaaattacagagaagaaataacagaaactaaaaactctttttgttgattgagacacccgatgcgtaagccaaggtccaggtgcagtgaacacaatggctaaatattgcacctttcttttccccctcagttttaacctattttttcttatgcattttctcagacaagaagtcagaagaatgcatctctgctacagaaaatagcgatttcacataactacaagttatcaatttcccctccccttaaaaaatctcaatcgtgacaatgcgcacaaatcgctaccctgccagacagatttttagggagagaaccatgctgttatacattttgtatttggttggcattactgccgaagccatgacgggggcgctggcggccggacgacggcgcatggatacatttggcgtaattattattgcgaccgccaccgcaattggcggagggagtgtgcgcgatattctgctgggccactatccgctcggctgggtcaaacacccggaatatgtgattatcgtcgctaccgccgcagtactcaccactatcgttgctcctgtaatgccttacctgcgcaaagtgtttctggtgctcgatgcgctcggactggtggtcttttctatcatcggggcacaggttgcactggatatggggcacggcccaattattgccgttgtcgcggcggtaaccaccggcgtgtttggcggcgttttgcgcgatatgttctgtaaacgtatcccactggtattccagaaagagttgtatgccggtgtcagttttgcctccgccgtgctgtacatcgcgctgcaacactatgtttctaaccatgatgtggtaattatctccaccctggtattcggcttttttgcccgcttactggcgctacgccttaagctgggattaccggtcttttactacagccacgaaggacattaaggttcaaaacctgtgatctgctgggcagccagccaactgcccagcttcttgatttgcgcattttccttccattcaataacctgtctggcgcgtccgcttccagtccccggcagctgctgccagaactgctccgtgctaaataaaagttggctccaggaccgttcatcactggcattaagcgccgcccgggttagcggtattcccattgccatcacccagcgagtaaaaggctgcttacgagccagattaaactgatgccatagctgcgcacttttacttttcgcgatccccggcgtgttctgtaattgctctggcgttaataaaagccaggaaaagatatgttcaaagcgatgagtctgatgcagcgcgcgccaaccggcctcaccaatgccatccagcccaagaacctgttttgcccccagccagactaagcgactaatgaactgttcctgacaaacatcagaagcaaagtagcaggtcaagctgttaaagcggttttctggcggtgtcggttttgtacgttctgcaccgcgccacaccacatcatcaatgcgaggaataccctgaccggcaaggctgacgagaatctgatcaccaggcgcaatatcccactcctgccagcgcctgacggaaccaatattcacccgctggacttttttatcatccagcatgacaggtgcgagactcgcaaccacgcttattttaccgctcttacccaccgcaaactgaattgccttcacttcggcaacctgagctacaggttgatatttccaggccaccagccactctgcctggcccggtagccaatggcgggattctggctctttcgccgctcgtacaactacgccatcggtgacgaagggtaattccgctttccaccactcattgcgtacgcgcgcaacttcatcagcatttttcaccgcacgggtatacgtctgcgttagagtaaaacctgcggtagccagctcttttaaacgatcagacattaactgcggtccatccggccatgcccagacaaaaacgcccagagaattcagcgtgtcgctatcgtcctggcgcatcatcaagccagcaacttttgcgcgggcatttattccccccatttgttgttggatatgcccctcgcgctggagaaatatttccccctgaagcgtactgttggctaaaggcccgctaacggtttgcggcacagcggaaattaagctaactttctgcgtccagtcctcgcctttcaggccattaccgcgactgattgctttgttcagtttcccgtcccgataaaccagggttaccgcaacgccatcaacttttggctgcacccaaagatcgctacgttctcgcatccacagacttaatgcgtttttatccaccattttgcgtacacccgtatgggcaaccggatgcataaccgcaccatttaaaggcggcatcatcacgtcgcggggctcgctcccaaagcagcgttgccactgcgtaagacgggcgcttaactgatcgtaaacaccgtcttccacctcactttttccttccttccagtagtcatcgtcccactgttttatttgctgttgcaggcgggaaatttcttcctgtgctctggctgggctccaggccggacagaccgcccacacagaactttgccagcacaagatacctattaatatcgccatccatactttcatcatcacctccgctgtagatagtcaggcagatatacaacgtgatgaaagcaaagccgagtggcaaaaacggagtctgcgaggacgcttcctgaaaatcgtctttattgcagtgaatgacaggcaaatgcggaagcagctacgcaaaacgcaacaactttgcgcaaaaagtgtgagcaagggctacgtcacatggccgcgccgtgtataataagctcgtatgtaggctttatttcgctaatcacatacgaaagatactcatggctcaaggcacgctttatattgtttccgcccccagtggcgcgggtaaatccagcctgattcaggctttattaaaaacccaaccgttgtgtgacacccaggtttctgttagtcacaccacacgccaaccgcgtcctggtgaagtccacggtgaacattatttctttgttaatcatgatgaatttaaagaaatgattagcagagatgcgttcctcgaacacgcagaagtttttggtaattactatggcactagccgtgaggccattgagcaagtactggcgaccggtgtcgatgtttttctcgatatcgactggcagggcgcgcagcaaattcgccagaagatgccgcacgcgcggagtatctttattttaccgccgtccaaaattgaactggaccgccgtctacgcggtcgcggtcaggacagcgaagaggtcattgcaaagcgtatggcgcaagctgttgcagaaatgagccattacgccgaatatgattatctgattgtgaatgatgacttcgataccgcgttgaccgatttgaagaccattattcgcgccgaacgtctgcgcatgagccgccaaaagcagcgtcatgacgctttaatcagcaaattgttggcagactgaacctgatttcagtatcatgcccagtcatttcttcacctgtggagctttttaagtatggcacgcgtaactgttcaggacgctgtagagaaaattggtaaccgttttgacctggtactggtcgccgcgcgtcgcgctcgtcagatgcaggtaggcggaaaggatccgctggtaccggaagaaaacgataaaaccactgtaatcgcgctgcgcgaaatcgaagaaggtctgatcaacaaccagatcctcgacgttcgcgaacgccaggaacagcaagagcaggaagccgctgaattacaagccgttaccgctattgctgaaggtcgtcgttaatcacaaagcgggtcgcccttgtatctgtttgaaagcctgaatcaactgattcaaacctacctgccggaagaccaaatcaagcgtctgcggcaggcgtatctcgttgcacgtgatgctcacgaggggcaaacacgtagtagcggtgaaccctatatcacgcacccggtagcggttgcctgcattctggccgagatgaaactcgactatgaaacgctgatggcggcgctgctgcatgacgtgattgaagatactcccgccacctaccaggatatggaacagctttttggtaaaagcgtcgccgagctggtagagggggtgagcaaacttgataaactcaagttccgcgataagaaagaggcgcaggccgaaaactttcgcaagatgattatggcgatggtgcaggatatccgcgtcatcctcatcaaacttgccgaccgtacccacaacatgcgcacgctgggcagtcttcgcccggacaaacgtcgccgcatcgcccgtgaaactctcgaaatttatagcccgctggcgcaccgtttaggtatccaccacattaaaaccgaactcgaagagctgggttttgaggcgctgtatcccaaccgttatcgcgtaatcaaagaagtggtgaaagccgcgcgcggcaaccgtaaagagatgatccagaagattctttctgaaatcgaagggcgtttgcaggaagcgggaataccgtgccgcgtcagtggtcgcgagaagcatctttatagcatttactgcaaaatggtgctcaaagagcagcgttttcacagcatcatggacatctacgctttccgcgtgatcgtcaatgattctgacacctgttatcgcgtgctgggccagatgcacagcctgtacaagccgcgtccgggccgcgtgaaagactatatcgccattccaaaagcgaacggctatcagtctttgcacaccagcatgatcggcccgcacggtgtgccggttgaggtccagatccgtaccgaagatatggaccagatggcggagatgggtgttgccgcgcactgggcttataaagagcacggcgaaaccagtactaccgcacaaatccgcgcccagcgctggatgcaaagcctgctggagctgcaacagagcgccggtagtagctttgaatttatcgagagcgttaaatccgatctcttcccggatgagatttacgttttcacaccggaagggcgcattgtcgagctgcctgccggtgcaacgcccgtcgacttcgcttatgcagtgcataccgatatcggtcatgcctgcgtgggcgcacgcgttgaccgccagccttacccgctgagccagccgcttaccagcggtcaaaccgttgaaatcattaccgctccgggcgctcgcccgaatgccgcttggctgaactttgtcgttagcagcaaagcgcgcgccaaaattcgtcagttgctgaaaaacctcaagcgtgatgattctgtaagcctgggccgtcgtctgctcaaccatgctttgggtggtagccgtaagctgaatgaaatcccgcaggaaaatattcagcgcgagctggatcgcatgaagctggcaacgcttgacgatctgctggcagaaatcggacttggtaacgcaatgagcgtggtggtcgcgaaaaatctgcaacatggggacgcctccattccaccggcaacccaaagccacggacatctgcccattaaaggtgccgatggcgtgctgatcacctttgcgaaatgctgccgccctattcctggcgacccgattatcgcccacgtcagccccggtaaaggtctggtgatccaccatgaatcctgccgtaatatccgtggctaccagaaagagccagagaagtttatggctgtggaatgggataaagagacggcgcaggagttcatcaccgaaatcaaggtggagatgttcaatcatcagggtgcgctggcaaacctgacggcggcaattaacaccacgactagcaatattcaaagtttgaatacggaagagaaagatggtcgcgtctacagcgcctttattcgtctgaccgctcgtgaccgtgtgcatctggcgaatatcatgcgcaaaatccgcgtgatgccagacgtgattaaagtcacccgaaaccgaaattaatgttttatgaacccaacacgttatgcacgcatctgcgaaatgctcgccaggcggcagcctgatctgaccgtctgcatggagcaggtccacaaacctcataacgtttctgcgattattcgtaccgcagatgccgttggcgtacatgaagttcacgccgtctggcctggtagccgcatgcgcaccatggctagcgcagcggcgggtagtaacagctgggtacaggtgaaaacacaccgcaccattggcgatgccgtcgctcatctcaaaggccagggcatgcagattctggcaacccatctttctgataacgctgtcgatttccgcgaaattgattacactcgcccgacctgcattttgatgggacaggagaaaacgggcatcacgcaggaagcattggccctggcggatcaggacatcatcattccgatgatcggcatggtgcagagcctgaatgtttccgttgccagtgccctcattctttacgaagcccagcgtcagcggcaaaatgcaggcatgtacctgcgtgaaaacagcatgttgccggaagcagagcaacaacgcctgttgtttgaaggcggctatccggtgctggcgaaagtcgcaaaacgcaaaggcctgccttatccccacgtcaatcagcaaggcgagatcgaagctgatgccgactggtgggctactatgcaggctgcagggtaagtgccatgaaaggtcgcctgttagatgctgtcccactcagttccctaacgggcgttggcgcagcacttagtaacaaactggcgaaaatcaacctgcataccgtgcaggatctactcttacaccttcccctgcgctacgaagatcgcacccatctctaccccatcggagaactactgccgggcgtttatgccacggtggaaggcgaagtgctgaactgcaatatctccttcggcggtcggcggatgatgacctgccagatcagcgacggttccggcatcctcaccatgcgctttttcaatttcagcgcggcaatgaaaaatagcctggcggcgggccgccgtgtactggcttatggcgaagcaaagcgcggtaaatatggtgcggagatgatccacccggaataccgcgtgcagggcgatctcagcacgccagaattacaggaaacgctcacgccggtttatccaacaacggaaggcgtaaagcaggccacgctgcgtaaattaaccgaccaggcgctggatctgctcgacacctgcgccattgaagaactcctgccgccggaactgagtcaaggaatgatgacgctaccggaagcgttgcgcactttgcaccgcccgccaccgacgctacagcttagcgatctggaaaccgggcagcatccggcgcaacgtcgtctgattctggaagaactgctggcgcacaacctcagcatgttagccttacgtgccggagcacagcgttttcatgcccagccgctgagcgccaatgacacgctgaaaaataaactcctcgccgccttaccgttcaagccaacgggcgcacaggcacgcgtagtggcggagatcgagcgcgatatggcgctggatgtgccgatgatgcgtctggtgcagggcgatgtaggttccggtaaaacgctggtcgccgccctcgccgcgttgcgtgcgattgcccacggcaaacaggtagcattgatggcaccaaccgaattactcgccgagcagcacgccaataacttccgcaactggtttgcaccgctcggtatcgaagtgggctggctcgccggtaagcagaaaggtaaagcacggctggcacagcaggaagccatcgccagcggtcaggtgcagatgattgtcggtacacacgccatcttccaggaacaggtgcagtttaacggcctggcgctggtgattatcgacgaacagcatcgttttggcgtgcatcagcgtctggcattgtgggagaaaggccagcagcagggcttccatccgcatcagttgatcatgaccgccacgccgatcccccgcacgctggcaatgactgcgtatgccgatctcgataccagcgtgatagatgagctgccgccaggccgcacgccagtgactacggtcgctattcctgatacccgccgtaccgacatcattgaccgcgtgcaccacgcctgcataactgaaggtcgtcaggcatactgggtttgtacgttgattgaagagagcgaattgctggaagcgcaggcggcggaagctacctgggaagagttgaaactggcgctaccagagttgaacgttggcctggtacacgggcggatgaaacctgccgagaaacaggcggtgatggcgagctttaaacaaggtgagctacacctgctggttgccacaaccgttattgaagtcggcgttgatgtgcctaacgccagtctgatgattatcgaaaacccggagcgtctgggtctggcgcagttacaccagctgcgcgggcgcgtaggtcgtggcgcggtggcttctcactgcgtgctgctctacaaaacgccgctttctaaaacggcgcaaattcgcctgcaagtgctgcgcgacagtaacgacggttttgtgattgcgcaaaaagatctggagattcgcggccctggcgaattgttaggcacgcgtcagacgggtaatgctgaatttaaagtggcggatttactgcgcgatcaggcgatgatcccggaagttcagcgcctggcacgccatattcacgaacgttacccacaacaggcaaaagccctgatagaacgctggatgccggagacggaacgttacagcaatgcgtaaaaggcggcagtgagaagaccgccatttcaggttaccctaccttcctgccggatgcgattcatcaccctacaaattcaataaattatgaatcaatacgcaggcttgataagcgaagcgtatcaggcatttgtctttgttgcggcggcacttctaccgccgcttcatcggttaaccggcaaaaatcggcaacatcaaatacaacttaattaccagcgcattgacgatatcgataaagaacgcaccgaccatcggcaccaccaaaaacgccatgtggcccgggccaaagcgttcagtgatcgcctgcatgttggcgattgccgttggcgttgcaccgaggccaaaaccacagtgacccgcagccagcactgccgcatcgtagtttttgcccatcatgcgccaggtaacgaagatggcatacaacgccatgaagatggtctgtaccaccagaatcgccagcatcggcagcgccaggctagccagctcccacagtttcagccccatcaacgccatcgccaggaacaagctcaagcttacgttacccagcacggataccgcacgctcaaagacgcggtaaaagcccattatactcagaccgttgctcagaatcacgccaacaaacagtacacagacgaaggtcggcagttcaaaagcagtgccagccaaaagttgcgcaacaattttccccaccgtcaggcagatagcaatcagcgcgatagtttcaatcagcaccaagctggtgatcatgcgtcccacatccggcttttcaaacgccgtcgggacttcctggtcatccggaataccgttcggcgtggtggagtgtttcaccagatagcgcgccaccggaccgccaatcaagccgcccagcaccagaccgaacgttgcacaggccatcgccacttccgtcgcattggtgaagccataacgttcaatgaacaatttactccacgcagcgcccgtaccgtgaccgccggaaagagtaatagaaccggccaacagccccatcagcggatcaagccctaacaagctagccataccaatgccaatggcattttgcatcaccaacagaccaacaaccacaatcaagaagatgccaaccacacgcccaccggcacgcaaactggcaatgttggcgttcaggccaatggtggcgaagaaagccagcattaacggatcgcgcagggacatatcaaagttgacttcccagcccatgctttttttcagtactagtagcgccagcgccaccaacaaaccacccgcaacaggttccggtatggtgtatttcttcaaaaaggagacggaatggaccaacttacgcccgagcagcaacgtcagcgttgcggcaacaagcgttgctaaagtatcgagatgaaacatagttactcctttgtatccgcatcactctttcatactcgtcatacttcatcgcgcagtggcaacttcatgaactatgacgggtatcgagttatgctttcctgggtcaaattctcagctgttaatgaacaaatggcatggattttaagcagaaaaataccaaaagttatataaaaaagtgcatttatctcatttaaatatttagatgaggatgtggcaaacgtttgcttttctctttcggtcagctaaaatgcccgctttgctaccacgggattgttttcgatgtctgtttccaccctcgagagtgaaaatgcgcaaccggttgcgcagactcaaaacagcgaactgatttaccgtcttgaagatcgtccgccgcttcctcaaaccctgtttgccgcctgtcagcatctgctggcgatgttcgttgcggtgatcacgccagcgctattaatctgccaggcgctgggtttaccggcacaagacacgcaacacattattagtatgagcctgtttgcctccggtgtggcaagcattattcaaattaaggcctggggtccggttggctccgggctgttgtctattcagggcaccagcttcaactttgttgccccgctgattatgggcggtaccgcgctgaaaaccggtggtgctgatgttcctaccatgatggcggctttgttcggcacgttgatgctggcaagttgcaccgagatggtgatctcccgcgttctgcatctggcgcgccgcattattacgccgctggtttctggcgttgtggtgatgattatcggcctgagcctaattcaggttgggttaacgtccattggcggcggttacgcagccatgagcgataacaccttcggcgcaccgaaaaatctgctgctggcaggcgtggtcttagccttaattatcctgcttaaccgtcaacgtaacccttacttacgcgtggccagtctggtaattgcgatggcggccggatatgcgctggcgtggtttatgggcatgttgccagaaagcaacgaacctatgacgcaagaactgattatggtgccaacgccgctctattacggtcttggcattgaatggagtctgctgctgccgctgatgctggtctttatgatcactagcctggaaaccattggcgatatcacggcgacctctgacgtttccgaacagccagtgtccggtccgctgtacatgaaacgcctgaaaggcggcgtgctggcaaacggcctgaacagctttgttagcgcggtgtttaacaccttcccgaactcctgcttcgggcaaaacaacggagtgatccagttgactggtgttgccagccgctatgtcggttttgtcgtcgcgctgatgttgatcgtgctgggtctgttcccggcagtgagcggttttgtacaacacattccagaaccggttctgggcggcgcaacgcttgtaatgtttggcaccatcgccgcctccggtgtgcgtatcgtttctcgtgagccgctgaaccgtcgggcgattctgattatcgcgctgagcctggcggttggtctgggcgtgtctcagcagccgctgattttgcagtttgcccctgaatggctgaaaaacctgctctcctccgggatcgccgcgggcggtattactgccatcgtgctgaatctgattttcccaccagaaaaacagtaattcactggcggcggtaagataattaccgccgcagtctcacctctttaaccattcccgccttgaggattgcgcgtaaatcgtgcataactcccttatgtgcatttcacgggatggaagaccatgaaatttattgggaagctgcttctctacattctcatcgctctgttagtggcgatcgctggcctctattttcttctgcaaacccgctggggagcagaacatatcagcgcatgggtttccgagaatagcgactatcatctggccttcggggcgatggatcaccgtttttccgcgccatctcatatcgtgctggagaacgtcacgtttggtcgtgatggccagcccgcgaccctggtggccaaaagtgtcgacattgcgctaagcagtcggcaactgaccgaaccacgccatgtcgataccatcctgctggaaaacgggacgctgaatctcaccgaccagaccgcgccgctaccgttcaaagccgatcgtctgcaactgcgtgatatggcgtttaatagcccgaatagcgaatggaaactgagcgcgcagcgggtaaatggcggcgtagttccgtggagtccaaaagccggtaaagtgctgggtacgaaggcgcagattcagtttagtgccggaagccttagcctcaatgatgttcctgccaccaatgtactgattgaaggcagtattgataacgatcgcgttacgctgactaacctgggtgccgacatcgcccgcgggacattaaccggaaacgcgcagcgtaacgccgacggcagctggcaagtggaaaacctgcgcatggcggatatacgtctacaaagcgaaaaaagcctaaccgacttctttgcgccattacgctctgtcccgagcttgcagattggtcgcctggaagtgatcgatgctcgtttgcaaggtccggactgggcggtgaccgacctcgatctcagcttgcgcaacatgaccttcagtaaagatgactggcagacacaggaaggcaaactgagcatgaacgctagcgagttcatttatggtagcctgcatttatttgacccgattataaacacggaattttccccgcagggcgtagcgctgcgccagttcaccagccgctgggaagggggtatggtcagaacgagtgggaactggctgcgtgacgggaaaacgttgatccttgatgatgcggcaattgccgggctggaatataccttgccgaaaaactggcaacagttgtggatggaaacgacacccggttggttaaacagcctgcaactgaagagatttagcgccagccgcaatctgatcattgatatcgaccctgacttcccgtggcagctcaccgcgctcgatggttacggtgccaacctgacgctggttaccgatcataaatggggcgtctggagtggcagcgcgaatctgaatgccgccgccgcgacattcaatcgtgttgatgttcgtcgcccgagcctggcgctgaccgccaacagcagcacggtgaatatcagcgaactgagtgcatttactgaaaaaggcattctggaagccaccgccagtgttagtcaaacgccacaacgtcagacacatatcagcctgaatggacgcggtgtgccggtgaatattttgcaacagtggggatggcctgaattaccgttgactggcgacggcaatattcagcttaccgccagtggcgatattcaggccaatgtcccgttgaaacctacggttagcgggcaattgcatgccgtgaacgccgcaaagcagcaagtgactcaaaccatgaatgctggcatcgtttccagcggtgaagttacaagcacggagccggtgcggtaaacatcaatctcgccgggtacgactcagacgtacccggcattccatcaatagattacaacgtaattgtcagcgcattcccttgaggcttcaccaccagcccctgctcactttcagcctggctaccgtcttgcagaccatttactttcacaacattgcgcaggcacagtgtccagttcttcgcctcgcccgcaccagtcacagtaatcgtgttgccagtacgtgctgcttttaaagtaaagatcacgcttccgtcagcagcgggcacttcacagacggcttcatgcccgtcttgcagattgaagaggtggaatgccgtgccttcgtgccacacgtaatcgggacgttgatcgttgttgcccagcgccagtagagtgttatcacgcacataaacgggcagactcaggaagccgtgctgctgtttatgccagcgactaccgtcgagttcatcgttgtgccacaggtgtgtccagcgaccttccggcaggtagaactgcacatcgcccgcttcagtgaacaccggcgcaaccatcacgttgtcgcctaacatgtattgacggtcaaggtaatcacaagccggatcgtccgggaactccatcatcatggcccgcatcatcggcgtaccccgcgcgttcgcacgcgcagcttcacgatacagatacggcatcatgcggcatttcagttgcgtgaagaagcgcaccacatcacaggactcatcatcgtaggcccacggcacacgataagatttgctaccgtgtaaacggctatggctggagagcaaaccaaacgcgcaccagcgtttgtaaacgtgcgccggagcggtattttcaaagccgccgatatcgtggctccagaagccaaaaccactaaggccaatagacaaaccaccgcgcaggctttccgccatactttcgtagttagcgtaacaatcgccaccccagtgtaccgggaatttctgcgcaccgacggaggcgctgcgggcaaacaagacagcttcttcctcaccaacggtgtccttgagcacgttccacaccagttcgttgtagatgtacgcataatggttatgcattttctgcggatcggaaccgtcaaaccactgaacatcagttgggatacgttcgccaaagtcggtcttaaagcaatcaacgcccatcgcgaccagacctttcagtttgtcggcgtaccatttgcaggcatccggattggtaaagtcataaatcgccagacctggctgccatttatcccactgccataggctaccgtccgggcgtttgagtaaatagcctttctcttgtaactctttaaagacgggggatttttgaccgatataggggttaatccagacgcagattttcagtcctttcgctttcaggcggcggatcatcccttccgggtcagggaaagtcagcgggtcccactcaaaatcgcaccactggaaggctttcatccagaaacagtcaaagtggaaaacatgcagcggcagattgcgttccgccataccatcgataaagctgtttaccgtcgcttcgtcgtagttggtggtaaaactagtggttagccacaggccgaaggaccacgcgggcggcagcgccggacgaccagtaaagcgggtataacgatcaagtaccgctttcggcgtcgggccgtcgataacaaagtattcgagatattcactctcaacgctgaactgcactttggagactttctcgcttcccacttcaaaagagacacactggggatgattgaccagtaccccataaccacggttagtcatgtagaacgggatatttttatacgcctgttcagtacttgtgccgccgtcccggttccaggtctctaccgtctggccattgcgcaccagggcagtaaagcgctctcccagaccgtaaactgtttcgccaacgccaagatcaagccgctcaaacatataattgcgttgattattcgtgtcctgcacgtagccattatttttcacctgactaccggtaatacgttcgccgttgcgcagaaaatccagactccagaactcacctttgctgacacgcgcgcttaagttgccacttttaaactcagcataacgttctgtgttttcgattgtgaccttcacgtcctgcaaaatattgagcggataatgaggaccgttattcagcgccccctgaaaatgctcaatccgcacaccgacaataccttcctgtggggagaaaaagcgcaacgtaaataaaggcgtatcaagctgccaggtacgttcacgcacatcacggggggcagcatagaccaccatttcattatcctgctgttcaacctcgaacacctgaagcgggtgaatcaaattgaggccaggttgaatcaaccagtttccatcgctaattttcattgccgttccttagttctgcacttcttgagaggtgaattgttgctggcaacggcgtttaccctgagccagctgttccataacggttttcagattgtgcgtcgtgagactgtagtagcgtttagcgataatcgcgctcagcaaataacagatcgccggaacaatcgtgaatagcgcaataatgatgctaatcgtggcgctgttctgcgctttttctgccgcatcatatccgccataagccagcatccagccgataagagcgccgccgaaggccaaccccagtttgagcacaaacagcgtgccagcaaaactgatcccggtcaggcgtttaccattgcaccactcgccgtagtcgacggtatcggacatcattacccactggataggtgtcaccagttgatgcaacacaccaatcacgaagatgaagacaaacatagtgatgctggcctgcatgggaacaaagaacatcgcgaggctaatcactgccagcagggcgttcgtccaccagaagatagtgactttacatttccagtcggtcagaggttttgccagtgcggaaccaatcaggttacccacgcaataagtggtgagaaaagcgacaaacacttccggcgtgcccaaaatccatgtgacgtaatacatcatcgccccaccgcgtacgcacaccgccaggatattgaaaatggttagtaaaccgacaatccgccactggtcgttttgccagatatcacgtaaatcttcccgcatagacgttgttgtaggtggtgcttcaacgcgttctttagtggtgaagaaacaaaatgccagcatcatgaatgccaccacggaaaggaccgcgataccgccctggaaaccgagtggtttattatcaccgccaattaaattaaccagtggcatcatcagaacagtagaaagcatgcctcccgcggtcgccagcacaaaacgccaggattgcaggctgatacgctgagtcgggtcattggtgattacaccacccaatgcgcagtaagggatattgacgacggtataaagtaaggtaagtagggtgtaagtaattgctgcatagatcattttgccgttcatactgagatctggcgtgctataggccagtacacagacgatcccgaatggcagtgcgccaaacagtacccacggacgaaatttaccccagcgagagcgcgttcgatcggccaacaaccccatgcaaggatcggaaatcgcatccagtgcacgagcgaccaaaaacatggttccgacaaaaccggcaggaatgccaaaaatatcggtataaaagaacatcatatataacattacgttatcgaaaataatgtggctggcggcgtctcccatgccataaccaattttctctttaacggacaacacttcactcttcatctgcttttccttgatgctataggggtgctgagaccgataacgcattttgtaaaccatccctgtgagagcgaatattccgatatctggttattaatttatgattcttgttttatgtgatcgtggtagcgttaattccgctcatatatcattgtaaaatatgggttttatatgaactataatgctttcgtgataatacgctgcgtgtattaggcggaaaaaactgatctgggggatgtagaaactcaaggaagtagctataatgcgccccgcctccatgtagcaatcgaggcgcggaagatcgtcgtctccggtgaggcggctggacttcaaatccagttggggccgccagcggtcccgggcaggttcgactcctgtgatcttccgccaaaatgcctctcctgacgttctccaaccccttgtaatactgtcaatccagatattttctactgctcaatattcaatcggcttcaggaatacctggtctaaggttttgtgatggacgatgagcggctgaagaatccgcctgtcggttcttctgtcctcgaacgcatccgcgatattcacgccagtatgcgccgtgtttatttgcaggtgatttgcccccctgctgactctcagccaactgtatcgccattaaggtgaagatgttgttttactcgccccagaacacccttttttatacgactattctatttctttaaccgctggcgaaaaaaactgactataaacttcaccaataatcagactgccatcaagattaatttgttcatttaatatatcaaatcaacttgttttatttttactatcaaaaatagctcattgccttactataattaatatataaattcggtaattaattcttaacatgcttttactaataatctcaattgctggccctataatattgcgctagcattgctttctggttgtatcagcgatactcaaaaattcttaatacaatactcattcgactggtacttatttgtaactcagttatattttttcgcccggtgattcagaagaatgcaaaaaacggctaccactccaagtaaaatacttgatctcactgccgcggcatttttacttgtcgcctttctgacgggtattgcgggcgctcttcagactcctaccctaagtatattcctcgcagatgaactgaaagcccgtcctataatggtaggttttttcttcaccggtagcgctattatgggaattctggtcagtcaatttctggcaaggcactccgataaacaaggcgaccgtaaattactgattctgctatgttgcttatttggagtgctggcctgcacgctttttgcgtggaatcgcaactacttcattctcctcagtacgggcgtacttctgagtagttttgcttccaccgcaaacccgcaaatgttcgccctcgcccgtgaacacgccgacagaacaggccgtgagacggtcatgttcagtacatttttacgtgctcagatcagccttgcctgggttatcgggccaccgctcgcttatgaactggcaatgggatttagttttaaagtgatgtatctcaccgctgccatcgcatttgttgtttgcggactgatagtctggttgtttttgccaagtatacaaagaaatattcctgtcgttacccaacccgtagaaattttaccctccacccacaggaagcgggatacgcggctactttttgtggtctgtagtatgatgtgggcggcgaataatctctacatgataaatatgccgctatttattattgatgaactgcatctaaccgataaactgactggagaaatgattggtatcgctgccggtctggaaattccgatgatgttaatcgcaggctattacatgaaacgtattggcaagcgactattaatgctcattgctatcgtgagtggaatgtgtttttacgccagcgtactcatggcgacgactccggcggttgagctggaattgcaaattcttaatgccatcttccttggtattctctgtggtatcggcatgctttattttcaggacttgatgcctgaaaaaataggctctgcgacaacgttatatgcaaatactagtcgcgtcggctggattatcgccggctctgttgacggaattatggttgaaatctggagctaccatgcgttgttctggctggcgatagggatgttgggtattgcgatgatttgcctgctgtttattaaagatatttaactcaccagtctgggctaagaaaaatcggcgtggcgcaaacagagccatcctcgccatttttgctatcatgcctgcatacataaacgacaaaacagtatgcagagggaaaaatgggttccaccagaaaggggatgctgaacgttctgattgccgccgtgttgtggggaagtagtggggtctgcgcgcaatacatcatggagcaaagccagatgagcagccagtttttgactatgacgcgtttgatattcgccggtttgattctactgacgctgagttttgttcatggcgataaaatcttttctattattaacaatcataaagatgccattagcctgctgattttttccgtggttggcgcgctaactgtacagctcacttttttgctaaccatcgaaaaaagcaacgcagccacggcaacggtgctgcaattcctcagtccgacgattatcgtcgcctggttcagtctggtgcgtaaaagccgcccgggcattctggttttctgcgctattttgacaagcctggtcgggacttttttattggtgacacacggtaatccgacgagtttaagcatctctcctgccgcgttgttctggggcattgccagcgcatttgctgctgcattctataccacctatcccagtacgctaattgcccgctatggcacgttaccagtcgtcggctggagtatgctgattggcggtctgattctgttgcctttttatgccagacaaggaacaaactttgtcgttaacggcagtttgattctggcgtttttttatttggtggtcattggtacgtccctgacatttagtctgtacctgaaaggagcacaattaattggcggtccaaaagccagcattttgagctgtgcagaaccattaagtagcgcgctactctctttgctgttgctggggatcacgttcacattaccggactggctgggaacgctgctgattctgagtagcgtgattttgattagtatggattcccgtcgccgcgccagaaaaataaatcgtccggcgcggcataagtgagaattaccagccaggcaccgcgccaccgttaaaaatggtttctgccgctttagcgacttcgggactttgataagattgcagaaattccttcacgttttctgcattcttattatcttcccgtgccaccaaaatattcacatacgggctattcttatcttcaataaatacgctgtcgtgcaccggagaaagcccggtctgctgaatgtaagtggtgctgataatcgctacatcaactttgggatcatccagtacgcgcgggagctgcgccccctcgagttccataatctgcaaatgacgaggattatcggttatatccagcgcggtaggtaataacccttttccctctttcagagtaattagcttctctttttgcaacagtaaaagtgcgcgaccaaggttggtcgggtcgttggggatcgccactgtcgcgccttcttttatttgcgccacggttttgatttttttggaataacccgccatagggaagacaaacgtatttcccaccgctaccagtttataaccatgcgcctgattatcttgttcaagaaagggtcgatgctggaagacattcgcatcaagttcgccatgatttgtcgcatcgttcggtagcaagctaccgctaaatcctaccagttcaacatcgaggccatatttctcttttgccacctttttagcgacttccgcgacatcttgttctgcgccatttataacgccaactttaatgtgttttgcatcgctgctactctggtcgcaacctgccagcagaattccggccagcaataatgcggcccctgtccgtagatgatgtgttgtcagtttcatttttttatccttttattaatgattacctgactatagcggtaaggtcgctgcggtttaaaaaacgaaacgctatcgataagaataaaaaggaataaaagtggaatataaagtctggcacttcttactgaccacgcaagcgcgtttcgtacagcatgatgagagcgatgaaagcaaactacacttatgcttcattcgatacacatttgtaaaaggttgaatccatgaaaccaacgacactactgcttattttcacttttttcgctatgccaggcatcgtatacgccgagagcccttttagcagtctgcagtccgcaaaagagaaaaccacggtattacaagatttacgtaaaatttgcacgccacaggcgagtttaagtgatgaagcgtgggaaaagttaatgttgagtgatgaaaacaataaacaacatatacgcgaggccatcgtggcgatggaacgtaataatcagagcaattattgggaagcgttgggtaaggtagaatgcccggatatgtaagaacagcaacaactactgaccaacgcttctttacctgatatcaggatttcttcattttcacctttgcagtaaccaacaatgcagtcagcaacatcaatgtgccggacaacatcaacgggctagtcagaccaatattatccagcgcataaccgccgattgccgcgccacaggtattagcaagctgaataaccgccacctgaatagacccggctttttctgcctgatcggccaggctgcgggtgatccacgtactccagccgacgggaaccaatgcaaaagttagcccccagataatcgccacgccggtagcaacgattttatcgcttccccacaacgtcagtaccaacgcactcacagccagtattaacggcgcgcctgctaaggccagttttacgctacgtttaagaatgaagctgctaaggctcgtaccaataaagctggcgataccaaaactcaacagcaccagcgttaagccatccacgccgaatcccgccaggttcatatacaccgggcgaatatacgtgaagaaagcaaactgcccggcgaaagacatgaagatggcgatcatccctgccatcacacccggacgttgtaataagcggaaagtattttgtttctgatggctgggttcgcctggcagactaggcaaacttttgataatccagaaaatacacagcacgcccatcaccgccgccgcattaaagacattgcgccaaccgataagctcgcctaaaaaactgcccaacggcgcggcaatcaccagcgcaatagaaaccgcgccgaagatcacgctcagcgccttcggcaccgtacgcggcggcaccagacgcatggtcaggctcgcgctcatcgcccagaacccgcccagcgccagccccagacaggcacgaccgattaaaagcaaactgaaactgttagcaaaggaaaccagcaagcaggagagcgtcagcaaaacggcaaacaaaataacaacgtagcggcggtcagtagcctgaattgtctgggtaataaacaaactggcaaacattgccacaaaggcggtcacggtcacgctttgcccggcaaccccttcgctaatgcctaaatcctgggccattggcgtcaacaaactgacgggcaaaaactcaacgataatcagacaggcgacacaaaacgccacgctgaaaacggcactccagttcggtcgggtgatggcatccgcgccgcggttttcggcaataaattcactcatggtgttacccgtggcatgtttcaggggaaaagcgctccactttaacatactaatgtgactcgcatttaacgtttttgcaacttttacggtgttgctactgctggagttaagatcgaaacggaacagggcaaagattaccggatgcggcgtgaacgtcttatccacccgacaggtcaggcgcggtctgtaggctgataagacgaaacggtttcaatgcaaccagtgaacgccctcggcaggctgaaagaacgcgttatagcgcatctgaaaagcattaatatcctgcatttcaggttcggtttcgcgcagaaaacctagcgccagcctgacctgagcgtcggtaatcggcgcggcgaggcgagctttttgtaaaatccgatgccattgcagcaggttctgttcgctaccatcgacaatgacaatttgccagatgagcaacacctgcgcggcgttttgcaggtggctctcatccggacgatgcaaataacgtaaaaattcgtcaccagcactctttcccatttgatcgaccatgctctccacgggtacgacatcgatgttcagccgatcgctgagacggcgaatcgcttttctggccccggatgtcagcacccgaaaaccaaccacaaacactaccgccagcgtggcgagcattatccagatcatgagttctcctgcgtaatcagaactcatgatatctggaaaccctcgccagttattaatccaccagaataatcttcagtgcaaacagagctgcgaccaccaccacacacaggttcagatcgcgccagcgcccggtgcatactttcatgatgcagtagctcataaagccgagtgcaatcccttcggtgatgctgaaagtaaagggcatcatcaccgtggtaataaacgcaggcacgctttcggtaaaatcatcccagttaacgcgcgccaggctgctagtcatcagcacgccaacaaagattaacgctccggcggttgcgtaaggaggaactatcgccaccagcggactgaagaacataaccaacaggaacataacgccaaccacaaccgcagtcagccccgtgcggccaccgactgccacaccagaagtactttcaatataggcagtaacagagctggtgccgataaacgcacccgccacgctactgacgctatcaacatacagcgccttattcatattggggaatttaccgttaccatctattaagcccgctttatcagttacaccaattaatgttccactactatcaaataggttgatcagcataaaggagaaaatgataccggcgagttcaagtgttaacgcgccgctcaaatctacttcaccaatgacgccgctaatatcaggcggaatggaatagacgccgctaaaatgaacatcaccgaaaaataatccacagcaagacgtcaccacaatagaaaccagcaccgcggcatgaaaatgacgactactcaacacggttataataaaaaaccctaaaatacctaacaacacgccgtgagaacttaaatcgccaatcatcaccagcgtgtctttattggcgacaataacgccagtattttttaatcccattaaggcgataaataatccaattccgctggtgataccaatacgtaaacttaagggaatgttggagatcatccagtaccggatacgaaacagcgtgagcaaaaatagtccaactgcgccccagaatattgcgcccatcccggtctgccaggagatgcccatcgcccccacgaccacgaaggcaaagaaggcgttcagccccattgccggagccagcgccacgggtaagttagcaaatatccccatcgcaatactgccgataccggcaatcaaacaggtggtaacaaacaccactttcgggtccatttgtgccgcgccgaggatttgcgggttcacaaaaacgatgtacaccatggttaaaaaagtggtcatccccgcaatcaattctgtgcggacggtggtcccatgctgaggtagtttaaataatcggctaagcgtcccactttcattactcacgtaatcggtattgtcattattcatttttttgtccattggaggagatttaatcccttgcttttgtaaaacaaatgacaacaacggttcagtgataattatcacatttcaattgcacattaatggatattctttaataatctcgcgacgtttctttatgataaataataatcaaattgataaaatcaaaatgagaaaaatatgaataattctattaaccataaatttcatcacattagccgggctgaataccaggaattgttagccgtttcccgtggcgacgctgttgccgattatattattgataatgtctctattctcgacctgatcaatggcggagaaatttccggcccaattgtgattaaaggacgttacattgccggtgttggcgcagaatacactgatgctccggctttgcagcggattgatgctcgcggcgcaacggcggtgccagggtttattgatgctcacctgcatattgaatccagcatgatgacgccggtcacttttgaaaccgctaccctgccgcgcggcctgacgaccgttatttgcgaccctcatgaaatcgtcaacgtgatgggcgaagccggattcgcctggtttgcccgctgtgccgaacaggcaaggcaaaaccagtacttacaggtcagctcttgcgtacccgccctggaaggctgcgatgttaacggtgccagttttacccttgaacagatgctcgcctggcgggaccatccgcaggttaccggccttgcagaaatgatggactaccctggcgtaattagcgggcagaatgcgctgctcgataaactggatgcatttcgccacctgacgctggacggtcactgcccgggtttgggtggtaaagaacttaacgcctatattactgcgggtattgaaaactgccacgaaagttatcagctggaagaaggacgccggaaattacaactcggcatgagcttgatgatccgcgaagggtccgctgcccgcaatctcaacgcgctggcaccgttgatcaacgaatttaacagcccgcaatgcatgctctgtaccgatgaccgtaacccgtgggagatcgcccatgaaggacacatcgatgccttaattcgccgcctgatcgaacaacacaatgtgccgctgcatgtggcatatcgcgtcgccagctggagcacggcgcgccactttggtctgaatcacctcggcttactggcacccggcaagcaggccgatatcgtcctgttgagcgatgcgcgtaaggtcacggtgcagcaggtactggtgaaaggcgagccgattgatgcgcaaaccttacaggcggaagagagcgcgagactggcacaatccgctccgccatatggcaacaccattgcccgccagccagtttccgccagcgactttgccctgcaatttacgcccggaaaacgctatcgggtcattgacgtcatccataacgaattgattacgcactcccactccagcgtctacagcgaaaatggttttgatcgcgatgatgtgagctttattgccgtacttgagcgttacgggcaacggctggctccggcttgtggtttgcttggcggctttggactgaatgaaggtgcgctggctgcgacggtcagccatgacagccataatattgtggtgatcggtcgcagtgccgaagagatggcgctggcggtcaatcaggtgattcaggatggcggcgggctgtgcgtggtacgtaacggccaggtacaaagtcatctgccgttacccattgccgggctgatgagcaccgacacggcgcagagcctggcggaacaaattgacgccttgaaagccgccgcccgtgaatgcggtccgttacccgatgagccgtttattcagatggcgtttctttctctgccagtgatccccgcgctaaaactaaccagtcaggggctatttgatggcgagaagtttgccttcactacgctggaagtcacggaataataaaaaaagcccggcgtcatgccgggcaaaagtcaccagttacgtttatgccactgtcaactgctgaatttttttctcgcggcggattttgcgttcttccattaccgccactatcgccatcaggcagatacaaccaatcgcggcgatatccagcgcggcgaaggtgcctgcccagccggtaaggccgaataccggcgtcccatcggcaatcattcccagacctaacttggcaaagctgtcaccaatcaggtaagcaaaggtgcctttaataccatcggcagcgccaatcgcttttttaggtacaaagccaacagcagccacaccaatcaacaattgcgggccaaagaccaggaaacccaacgcaaagagagaagccagatagatatattcgttactggcatgttgatacacaccgagcgtggcgataatcagcgccagcgcgatgcaggccaccaggccacggcgaccgttcgccaggtcagagagccagccccacagcagcgtaccgaccagcgcaccagcttcaaacagcgtaaagccctgaatcgccaccgctttagagagtttcagttcctggaacgcgtatacggtactccactggtcgataccaatacgtaccacatagaggaaaatgttggcgaagcacagcagccagatcactttgtttttcagcacatactcaacaaagatctgccacttggtcatatcggtagattctgtctctttgtcctcttcgctgatctcctcgccgaacagttcttcagctttgccgaggccataagattccggggagtcgctgccgtaacgcaggccgataaaaccgacaatcagcgcgataatgctcgggaagataaacatgccgatgacatggccatcgaacaggtaatttgccccgaacagcgccacacctgctgcgcctgcaccgccaaggttgtgagaaatattccagaaaccgaggaatgtcccgcgtttacgacgcggcgtccatttggtgatggtggagtaactgcagctaccgccggtactctggaaaagccgcttaaggcgtagaaggcaatcatcaggaacaggctaacgctgccgctgcccatactggcactgaagcccagcatacaaatagcagagaggatcagcatgaacggcaggaattgtttggtgtttttgccgtcggcgtagtaggaaaccagcgttttacccacgccataagtgatggagaaacccaggccgatcatccccagctgcgtcatgctcaacccgtaggtgctaatcatatcgttctgcgcgatgttaaagttcttgcgaatcaggtacatcgtcaggtagccgataaagaccaccaggtaggattgcatgaacggtttgaaccacattttgcgccgcacttcgagcggaaggtccagggtcggcttgcgaacctggtttaagaaagccagcatgggttactcctgaaatgaatacctgcgtgaggcatgcattgtaaaaatcagcagcaaatcaggcctgagatagcgtccaggcaaaacctggaaaatttcttagttttgccggatatgaagtgaaaaggtgagatgcatcacgcttcgcgcggtgtctgggcgttcaaaaagggcagtaacagcagtgcggaaatcccggcggcgatagagataaccacaaaaaatccgctccagtgccaggtatcgagtactttcgccagcggccaaccagcaaggctcgcccccagataagcaaacaagccgacaaaccccgtcgccgcccctgccgcctctttgtgggaacactctgccgccgccataccgattaacatctgtgggccaaagacaaaaaaaccaatggtgaagaagcaggttgcctgcatcacgtagctggcaaatggcatcagccacagggagccgacactaagcaaaattccggcggcgaaaatcaaattcatcggccctcggttgccgttaaacaatttgtcgctgccccaaccggctaccagcgcaccgataaatccgcccagttcaaacatcgtcactgccgtattcgccgtgaccagatcgacgcccagtgtctcggacatatacaaattgccccagtcgttgatcgccgcccggaccacatagaccagcacatagcaaaagctaagcagccagatatacggattcagcaacacatatttggtgaggatctctttacgcgtcaaccctgccccttcttgttgttgagcaatttccagcgcgtcgtgtcgccattcaccgaccgccggtaaacctaacgcctgcgggcgatcgcgtagccgccagcagagaaaaatccccacgactatcgccatacaaccagcaatcatcatcccggcacgccagccgtaatgcagcgcagccgctgccatcacaatgggaatgagtgcgccgccgacgttatgcgccgtgttccataatgcccaccaaccgccgcgctcggtacgactataccaggccgttaacagacgcgcacacaccggactaccccagccctggaaaaaggcgttcagcacccagagcacggcaaacgcccataggctcgtgctgaagccaaacagaatgttgataatgcccgtggcgataagccctatccccataaaataacgggcattactgcgatcgctgacaatgccggagacaaacttgctcacgccataggtaatgtaaaacagggtcgctaacaggccgatatcgctacggctgagcacgccgttagcaaggatttctggtacggcggcgttaaaacttttccgcgtgaagtaaaacagcgcgtaacccagccagatggtcagcagaatatgccgacgccagtagcgatagcgggcatcaatttcatatttatcagtcattaatggcgcatcggcaggcgctttcagaaacggcaacatcatcaaaccttagacatagcgttgaggtagagaaacgctgacacgcgtgccgtgcagacaggaaatgtgtaatgtgccacccagcgccgttacgcgctcgcgcattccggtgaggccaaaaccttgttgcccggaacccggcggcaaaccgctgccatcgtcttcaataaccagcatcaaccgttcatcctgctgccagccttgcagggtgaccgcgctggcatcagcatgtttcacaatgttgttcagcccttcctggcagacacgaaacagcgtcacgcgctggttttcgcttaacgcactttcatcgattcgccattcgagatggctgacaataccgcgcccttccagctccatttcccgcatcagactgcggatggcctgctccagggtgagatcatccaactggcgcggacgtaaccgacccaacaaacggcgcaccgcgtcgtaaacgcccaggcttagttgttcgatgagctgcccgctctgcttcacgctggcgttatctgccgccagccgctgaacaatgcccgcctgagtacgaatagcagtgatggtctgaccgatatcatcatgcagctcacgcgccacatcacggcgcacgctctcttcggtttccagcaaccgttcagccagatgctgattgcgcgccagttccttttgcaggctctggttaagttcacgcaaccgctggatgccagcgccaagcaacaaccctgtcagactttgcaccagcaggctgagcaataaatccaccggatgatcgcgccaggtttgactggcgatcagcgcgatggcgttcatcaacgtcgcaatcagcgccccttgccaaccatagtgccaggccagcgcgataatcggcagcgccagacagaatggcgtaaagcggctcagttcgtccggcaatcccaactggagccagagactgataacaaacagcagcaagtaccagaccagatgtcgcccgcgccagttgattggctgagaaaccagactcggaccgagcggcagccaggtgttattggcgagatagtgccagaacaccagacatatcggggccagcgtcaggccgccagttaaagtcagcaacagcgcattccagctctctttgccgtgccaaagccagggcaggctctgcaacaacgccgccgccgttaacgccgccccctgtaacagcaaggtgcgccagtcacgctgatggcgatagcggctgatcagcgctacgggcagtaacgtcagtaaactaccgatcatcaataacggaaaatgggttaaaccgaccgcctgcgttagccagtaaatcagcagccactccgcgcccagcaatacgggccagtatccgcgcgggcattgcagcattagccccagacgcagaccaaacggaaataacagcaccgccatatcagggcgctcaaccagatgcaggctgatactccacaggcaaaaccatgcggcagagaagataaaaaagcaggcaataacggtaattaagcgggagaacaacgtcttcatcaccagccatcaaacatgcggcgcgccagctctacgtcgttactgacgcccagtttttccatcagattggcgcgatggacgtgtaccgttttcggactcaagcccagttcggcggcaatctctttcaccgccattccttgcgccagtttttccgccacctggcgttcacgtttggttagcgggtcctgacgaccggatgccagtttaatggcaatatccggcgtcagataacagccgcccgtggcaaccgtatgcaccgcagcaatgagttcatccgggctacagcgtttggaaagaaagccgcgtgcccccgcgttaagcgcctgctcaaccagcgcaggactgtcgtgaacggagagcataatcgtcgccatacctttcggcagctggcttagcagctccagaccggagatatcgggcatggagatatcgcaaatacacacctgcacaccgcgccccggcagccccgccagcgcctcgcgcccgctaccaaactcggcaactacctgcaaatcaggttccagccccagcagctgcgcaaagccggagcggacgatgaggtgatcgtctataagggcaacggtgatcatggtcttgtcctggcgggtaaaaaaaatacgcgcttaccttaacgataagcgcgatgttgttcaagccttgagcggttactgaaaaaacaccgcgatcttgttaaacatcgtcggatcggactgattacgctgcactttcacgacatcttccagcttatcgatttggcttatcatctgctccagacgctggtcgtcattgaccagtagccagatatggcttttgtcgctgtcctgaatcggcagacaaagaatgccttcaacgttaaaagcgcggcgggcaaaaaggccacaaacgtgggtcattacgcccggatggttgcgaacggtgagctccagaattacgttgtcatgagttgtgttttgcatggcttattcccccaccatttcagtattcgccgcacctggcggcaccatcgggtaaactttttcttcggcatcaatgcgcacatggatcagcgccgggccagggcgattgatgatttcctgcaaactagcctgcggatcggcttcgttattcaaatcacaggtttcgaggccgaatccggcggcaatctgcataaagttgattttgcccggataggtggcggcaaaaacgccttgctcgtagaacagactctgttgctgatgcaccagccccagcgcttcgttgttcatcagaatgattttgacatccagctgattttcactggcggtcgccatctcctgaatattcatcatcaggctgccgtcgccggagaaacacaacactttgcgatccgggttcgccagcgcagcgccaatcgccgcaggcaggccaaaacccatcgtgcccagcccaccggaggtcagccactggcgtgggcgattgagcggataagcttgcgcggtccacatctgatgctgaccaacgtcggtggtgataattgcattgtcatcgacacaggcggcaacggcgttgatcaggccgtaatggcttaacggatcgcacgctttcgggattggacacggaaactcacgctgcaaatccgctaccaactggtgccactctgcacgcggttgcgcttccaccagcgggatcaactgcgccagcacgtcatcaacatccgcctgaatcgccacgtgcggctgcttgattttacccagctctgcacggtcgatatcgacatgaatgattttggcattcggacagaactgctcggttttgccaatcgcccggtcatcaaaacgcgcaccgagcactatcaacaaatccgcctcctgcaaaatatagttggtgctgcgcacgccgtgcatccccagcatacccaggctcaacggatgcgcttttggcaacatgcccagcgccattaaagtcatggtggtaggcagttgcgctttctccgccagttcacgcacccgtgcgggcgcattgatcacaccgccgcccagataaagcaccgggcgtttggcagcgttaatcatcgccgctgcgtcacgaatgctttcttcgctaaaggcgggggcggcggctttttctgccatagcgggctgtgtttcaatctcaaaaactgccgtttgcacatccttaggaatgtctatccacaccgggcctgggcggccactttgcgcaatgcggaaggcatcgctcatgacctgcgggagttcttcgatatgtctgaccagatagttgtgtttggtgatggggatagagatgccgtaggtgtccacttcctggaaggcgtcggtgccgatcatgctggcgggaacctgaccagtgatgcaaatcagcgggatggagtccagccgcgcatcggcaatggcggtcaccaggttagtcgcacccggtccgctacaggccatacagaccgccggtttaccgtcggtgcgcgccattccctgagcgataaagcccgcgccctgttcatgacgggccagaatatggcggatttgcgtgctttggcttaaggcatcgtaaacaggcaggatagaaccgcccggaatgcctgtcacaatcttaatgccctgctgttccaggaaatgaacgataaattctgcgccggtaaagcgcttacgcgtgcttgttgtgccgctacttgccatgctccagtccttttcttctgggccgactttccgggaggtgcttaaacgaaaaaccccgcccggtttgcgccggcggggttttggaatcgtgtgttgttccagtccttacggcgcattgccgacgaccaccaccacacgcacgacgaccactgcggcggatggcgcagttggtagtagttttgcgttgagcatggaagtagtcattggggaccttgttggttttgtgtttaacaatatttatacaagcacagctttacaggggagacaatggaaaatttttcagcaagggaaaattgaggggttgatcacgttttgtactgaattgcagataacaaaaaaccccgccggagcgaggtttcgtcagtcgcctgcggctggtaaccgcaaagcacactgtattatgtcaacactgaaagtatacgtgttccgcgcagaacgcgcaatttcggcacgaattttgacgtatttagtgcatagttgagtatcgatcacagtttgcgttttgtccaaatattactgtttatttatacagtaaacttctataatatcactgtacgcaatgtgttatgcgggggccgcatcgttacccggcgcactaagttctggctgaaacgggtggtgccgtcagcgccttaaccccgcgtgagcacactgtgttatgtcaacaagcacaacgtttctccttgagataccgcgtgcacaacagctggcaacaggcagcggaaaggtacgtcagctggcagtgctcctgaaccacaggagacgcgtatgaacctggtggatatcgccattcttatcctcaaactcattgttgcagcactgcaactgcttgatgctgttctgaaatacctgaagtaattcagattcaagtcgcaccaaaggggagcgggaaaccgctccccttttatatttagcgtgcgggttggtgtcggatgcgatgctgacgcatcttatccgccctaccatctctcccggcaacatttattgccgcttttgtttacatattctgccgctaaacaattccccattcctggcgtatatctggctaacattcatcaatgtgatagattcctctcccgcatttatgggaatgcgtagtgacttattctaattatttttataaaagcatccgtgataatgaaaaggcaaagaaacgtcaatttgttattgatgttggtattactcgtggccgtcggtcagatggcgcaaaccatttatattccagctattgccgatatggcgcgcgatctcaacgtccgtgaaggggcggtgcagagcgtaatgggcgcttatctgctgacttacggtgtcagtcagctgttttatggcccgatttccgaccgcgtgggccgccgaccggtgatcctcgtcggaatgtccatttttatgctggcaacgctggtcgcggtcacgacctccagtttgacggtgttgattgccgccagcgcgatgcaggggatgggcaccggcgttggcggcgtaatggcgcgtactttaccgcgagatttatatgaacggacacagttgcgccatgctaacagcctgttaaacatggggattctcgtcagtccgttgctcgcaccgctaatcggcggtctgctggatacgatgtggaactggcgcgcctgttatctctttttgttggttctttgtgctggtgtgaccttcagtatggcccgctggatgccggaaacgcgtccggtcgatgcaccgcgcacgcgcctgcttaccagttataaaacgcttttcggtaacagcggttttaactgttatttgctgatgctgattggcggtctggccgggattgccgcctttgaagcctgctccggcgtgctgatgggcgcggtgttagggctgagcagtatgacggtcagtattttgtttattctgccgattccggcagcgttttttggcgcatggtttgccggacgtcccaataaacgcttctccacgttaatgtggcagagcgttatctgctgcctgctggctggcttgctgatgtggatccccgactggtttggcgtgatgaatgtctggacgctgctcgttcccgccgcgctgttctttttcggtgccgggatgctgtttccgctggcgaccagcggcgcgatggagccgttccccttcctggcgggcacggctggcgcgctggtcggcggtctgcaaaacattggttccggcgtgctggcgagcctctctgcgatgttgccgcaaaccggtcagggcagcctggggttgttgatgaccttaatgggattgttgatcgtgctgtgctggctgccgctggcgacgcggatgagccatcaggggcagcccgtttaagcgcacgtcaccgcagcatcgtcatcagctccatgggagaacgatgctgctttatcagatcacgcatcacccgcatatgcggtgcggagtaagaataaaacgcctgatagcccgcacaaagcacgctgtctggcgtctcctgccgagcgtgcgggcacaggcgatgccagtcgcacgcctggcagtcacagcgcggttgcgggttttcgctgccacaccatttttgtaaggtggcgtcaaaaagctcaatgctgatacgactgatatctgcccgcacccaacactcgaacagggcaattaaaaatttcccccacagctctgctgtcacgctagcggccgtcagatcgccccggtcatcaaattcaagatagggaatgagctgtacggagcggatgccccgctgtttgaaattgtgataaaaatcggcaggttgcagagcatccttgtactctacaaccagtttatgcctgtcctcttcagcatcaatgacctgacttcctgtcatgcgactctctcaataaatacgataagttgatgtatatgcgttacagcaaacagtattgcgagagataacaccgcgagggagatcaaaaatttgtcacggactacgtgaaattgggaaaaatcgctattcgtgacatccattaaattgcgattacgggtgtagtgccagaggatcagcgccacgatggcgagaatgccaatgctaatccagaataacatgcccgcctggtgccagttgtgtttgatagccaacgccatcaacgcgccgtagcccagcatggtacgaaaccacgccagacttgtgcgctccggctgcagtcctgggtcggcaatgcgtctggctttgcggctatccggcatacaacaccagtcccataacgttaattatccggcatacaacaccagtcccataacgatcaccgccacgaccatcaatattaagctaatgattaataagctgttggtgtagggcaggtcctctttcagacgcatcgctttttcattgcgtaaccagcgcaagtagccatacatcgctaacccgccggaaaacagacacaacaacaacgccagcagttcgcgaatgacgggcgtggcgaaatctggcgcaagttgatcaagcccaacccccgccgccagaaatcctagtgcagtacggatccacgccagaaaagtacgctcattagccaggctgaagcggtaatcaggcgcttctccgaggcgggaaattttcattgttgctcctttgcaatttcactaacgctctacctttagcggtttttttaagaatttcgtccgcccgtttcctgatatgcttttgccatccgctacaaggaggtcagatgggtatcatagctcaaaataaaatcagtagtttgggcatgctgttcggtgccatcgctttaatgatggggattatccactttagtttcggccctttctccgcaccaccgccaacgtttgaaagcatcgtggcggacaaaacggctgaaattaaaagaggtcttctcgccggaataaaaggcgaaaaaattaccaccgtggagaaaaaagaggacgtagatgtcgataaaatcctcaatcaaagcggtatcgcactggccattgctgcgctactttgcgcatttattggcggtatgcgtaaggaaaatcgctggggcattcgcggcgcgctggtttttggcggcgggacgctggctttccataccttgctttttggtatcggcatcgtgtgcagcattttgctgatattccttatcttttccttcctgaccggcggtagtctggtttaagcagcctgaataatgcccgccgggtgatcatcagcgggcattatcgtcagaacttctgttttttctcctccaccttcaccccttgtgtcggtaggccggtgtcatagtcgcgtacaactgggctatagccatcttgtggacgtggacgaaacgccccatccagcgcggccgtgcatctttacgccacggacgcagactccattggtaactgcggaacggatcgcgaattttgtccatgtaatccaataaggcgtcatgcattttgctgcgaacgtctgcaaaacggatatcatcgatcaggttatgcatttcatttgggtcattacggcgatcgtaaagttcatcactggtgaagaggttgagtaccagtttaaagtcatccgtcacccagcaacgcaccggaataaaaccgccaaagctgtcatgctcaatctcgtagcggttaaattccaccatcacgccgcgtggctctttcacggcaaggatattttcccccggcagaatctctggtttttcaatatctgccagcgccatcattgtcggcagtaaatcgatatgactgactggcgtatcgacctgtcgccgctccccttgcgggctacggatgatcagcggaatgcgggtgatgtcgtcatacatcgccgcccctttactgatcagcttatgtgcgcccatcatttcgccgtgatcggaggtataaataacccacgtattttcacgttgctctggcgttaaggcattgatgacccgtccgatttggtcatcaacaaagtcattacaggcaaaatagagcggatggtgataaagcccgtcatcaccgactgggcttggcatcgcctgcgcccataagcggtgatgttccggtttgttagccaggtcatcctgtgctttctcgcccagctcgtagtaaaaatcagcgtatttctctaaatactccaccggacaggtgaacgggtgatgcggctcatcatagctaaccaccatcaggaaaggctcgtctgcgcgcgcaggctgttgcagaaaatccaccgcccgattgctgatacgatgcgcccaggtgaaggtttcgtcgatatggttcgcctgtaaatcttcgacgctgtttaggccattgcgccacaggctaatctctttttccgtcagttcgctaagatagttcgccccatcgaaccagtaatcagcgtcccactccggcggacactcgccagtgccgaaatagtcatgaccgtcgagatgccatttgccgatgtaacaggtgtgatagccggcatccttaaagtagcgccccatagtggagatgtttttgcctggcgcgacgttgttggtccacgggccggactggttagcgtagataccggtaaatagtccggcccgtgcaggcgtacaaaccggactacaggtgtaggcggaattaaagcgaataccttccgccgccagactatcaatattttgcgtattcagcggtttaccgctatagcaaccgaccatattggtggcctgggtatcggtcatgacgaacagaaaattggggcgtttcataggctatccttcccgtcgggagtaaaggttacggctgggtcgtgacgatgccgccagctgtcaaaaatcaggtagacaatcactacggcggcaatgaaataactgatcatcgctaaccagcgcgtaccgtagccgccgaattcagccagcccggcatagacgccaatcatcgcgaacaggatgccaatactcgcgatcttgacgtttttccacggtttcatgtccaccgcaaacgcatctttgaaggtgaacggcgtggcgcgcggtttgataaaaccgatcaccagcatcacgaccacgttgatgcagaacgtacaggccagcacatagaggaaatggaagtcgaacttcaccagatagttgatggtgatgtagctgattatgccaatccccatcgctacttttgccgccagcgccgggatgcgcgggaagaaaaagcccataatgatgatggtaaccagcggcacgttgtaaatgccgttgagctgtttcatccagctatacagcccctgcggcgcgttggcgatccacggcgcgaccagcacgctaacgatagcgataaagaaaccaaatttgcgcccgacggtgaccagctgctgcggctcggcattctggttaatgatgcgacggtaaatacccatactgaataacgtactggcgctattcagaaagccgttgaaggtactgatcaccgcaccaaataacaccgcgccgaagaaacccaccattggcactggcagaacgttattgaccagcgtcgggtaggccatgtcggctttcggtaaatcctgatacagatgaaacgcaatcaaccctggcagcaccagtaccagcgggtcgagcattttcagcaccgccgttaacagcgcccccttttgcccttccgccaggcttttactcgccagcgtgcgttgcacgatgccctgatttgtacaccagtaaaaggtgttcaccagaatcaaaccggtaaatgccgcgccaatcggcaagggatcggtcgggccaccgatactgtttaatttctcggcgtgaacggtggtgagttgctcaatgccctgcataaagctgcccttgcccatcgcgattaggccaaataccggcaccatcaacccgccgataaccagcccaataccgttgatggagtccgccactgccattgcgcgcagtccgccgatcaccgcatacaaaattcccgccagaccaagcaaaattaccagtagccagatagccgcaccgtgagaaatctgtaggctttccccgacgtgaaacaggctgttgagcgccaacgcgccggagtagagaacaatcggcagaaagcagacgccggtggcaattaggaagcagaagtcgatgataatacgcgtcgttttatcataacgttcctccagaaaatcggggatggtggcaatgccgcgcttcagatagcgcggtaaaaagattagcgcgaggaagatcagcgtcaccgcactagtcacttcccagcccatcacgctcatgccgcttttgtaggcctgcccggaaaggccgaccagttgttccgtggaaaggttggttagcattaagctagcggcaataaccggcgcttttagactacgtccggcaagaaaatagccttgttggcttccggtatctgttttgcggaccttccaccaggtgatcaccgccaccagcagcgtaaaaccgacaaaactcaagatttgtaagctattcatctcatagcccttatttatgtttatgtcccggacgcatgaatatagggagaggtaaaatgcgtcgggtcaggcagtcagattcttaaaatacaaacgtcgtatccctgaacggattgttttctgttaagttcaggttgtgagcataattcgccggagggatattaaaatgaatggaaaattgcaaagtagtgatgtaaaaaacgaaactccgtacaatattcccttattgattaacgaaaatgtgatctccagcggaatttctctgatcagcctctggcatacctacgccgacgagcattaccgggtgatctggccgcgggacaagaagaaaccgcttatcgccaacagttgggttgcggtgtataccgtacaaggatgtgggaaaattcttttaaagaatggcgaacaaataacactgcatggcaactgtattatattcttaaagccaatggatattcactcttatcactgtgaaggtttagtctgggaacagtactggatggaatttacccccaccagtatgatggatattcccgttggtcagcaaagcgttatttataatggcgaaatttataatcaggaactcaccgaagttgctgagttaataactagtccagaagcaataaaaaataatctggcagtcgcttttctgacgaaaattatttatcagtggatttgtcttatgtacgcagatggtaaaaaagatccacaacggcggcaaattgaaaaattaattgccactttacatgccagtctgcaacaacgctggagcgtagctgatatggctgccacgatcccctgtagcgaagcctggttgcgtcgtctgtttttacgctataccggcaagacgccgaaagaatattacctcgatgcgcgtctggatctggcgctaagcctattaaagcaacaaggaaacagcgttggcgaagtcgctgatacgctcaacttcttcgactcctttcatttcagcaaagcctttaaacataaatttggttatgcgccgagtgccgtgctaaagaatacggaccagcacccaacggatgccagtccacacaattaacgtaactctggccagtacgctttgttggcctccagcaactcatccagaatagctttggcgacgctggcgctcggtaccgttttgctcaacgtaatcgcctgccacaggtgctgataactacgctgttcccaggcgtccacgaccagtttttccaccgccacttgctgactcattaaccctttctgaaactgcgggatatcgcgctccaccagtggttcaggccgtagtagcgcacgcgcatctgtttgcgatcttgcagcccaacaatttgcgccatccggctttcaataccgattggcatgtcacagatgttgaggattttcgcattcgggcgcagacgacgcgtggcttctgcgacaatggctgccgggttggagtagttgagcatccaggcatttggactatatttttccatataatccaccagttccaggacgccgccaatggaacgcatgccgtacgctattccgccgggtccgcaagtttcctgaccaacaacgccgtggcgcagcgggattttttcatccagttcgcgcatcgggtatttgccgacgcggatgtgcgccatgacaaaatcaacgtcgctgaatgccacttcaggatcggtggtgtaactaaacgcaatgtccggcgctttttctttaaggatgactttacaggcttcggcaatcacttcctgccgcgcaccatcgttatcataaaatttcagtgcacgaagcgggaaacggtcctgattcgccaggagcatcaacacgatgcctggcgtaaaggtgcttccaccgcctgcgacaaccacactgaatttggtcattatactgcctccgtaatggcaacattttctgcactttgatgagaattaattaagctatcgagctgttcacgcagctgagatacatgcagaccaatgatcacctgaatggcatcgccactacggaagacgccgtgcgctcccagctttttaaagacttcgtcatccagcgtttgactcatgtcatgcagtgcaatacgtaaacgcgtcgcgcaattgttaatgctggagatattgccgaccccgcccagggcttgcaggataccggcagcctgatccagctcttttttttggctctgccgcggtggtttggcctcggctggctttgtattcggctttactgtagagtttcacttccgcatcttcacgtcccggcgtgcacatgttgaactgcagaatcagtgtgcggaaaaccacgaagtacagcagggtaaagcacaacccaatggcgatttgggtcagcatcatatccgcgtggttgctgaacatcgggatccagttttgcggtaaaacttagtcaatcagacctccgcccatgttgcccaccacaccaaagagatacattacggtgctcatactggccgccagcacggcgtgtaccgcaaacagcaacggactaatgaacaggaaggtaaattccagcggttcggtaattcccaccagcatggcggttaaggttgcgggaatcagcaagcccgccacttttacccgattttccggtgcggcagtgaagtacatcgctaaagaaatgcccacggcaccaaagattttactgttaccgtgcagggcaaaaccgccttccgggaacaagcttttcagcggctcggcgctcaaactgaactcttgcagatgctgcgcccagtacatctgaatgccgccttcaacagctgccggaccaaagataaactgtccgtagatgaagtggtgtaaaccggttgggatcagaatacgttcgaggaaggtgtaaacccagaccccaagtgcacccgcgctacgcaggaacgcttgcagagattcaatccccatttgtacttttggccagccgagcaacgtcagccaggcacaggggatcatcaccaggaaggcgataatcaccacataagacgtcccctggaaaatgccgagaaaaaccggcagttttttatcgaacagacggttatgcagcgccgtcacaatgccggaaatgataattgcgccgataatgctggtatcgagggttttaatcccggccatcattgtcagaccgctacctgccaccgcgtcctgagtgaaatcgacgccgaagtagcttccccaggccattcccatcgcgttgatgaaatagttccaggtcaggaaactcaccatcaccgccagacaagcacgcccctgcgcttgcttagcaaggccaatgggtaaaccgacagcaaaaatcagcggcatattacggaataccgtccaaccgccctcttcaataatgtgtacgatttgcgcgaataaactgttcggatcggtcagactttccccgacaaacatcgggttttgcagcaagatggcaagacccaccacaatcccggcgaagggaaacagcagcactggcgtgaacatcgcgccgccaaagcgttgaatttgactgagcatttccacatcctcttttctcaattctgtaagtaggaagcctgattggttatgcggcaggcctggagcgaggataggaagatgcgatcggcagaacatgacgacccaatgggattcgtgatcgctttcatgcttttcgttgggcggtagagatctacgttttcgcgaaaaagtagacctctgtgagcacaggtacacagcatcgaacacatctttaaaaaaaagatgttttttcaatcgattaagcagaacttgtgtgcgcattacccgggcttgcaggcaaaaaagagatctagagatgatctacaaaagcattgcggagcggttaagaattcgacttaactccgcagatttcacgctaaacagccttcttcccggtgaaaaaaagctggcggaagagtttgcggtaagccggatgaccatccgtaaagccattgacctgctggtagcgtgggggctggtggtccgccgccacggtagtggcacttacctggtgcgcaaagatgtactgcatcaaaccgccagtctgaccgggctggtggaggtgttaaaacggcagggaaaaacggtcaccagccaggtgctgatttttgaaatcatgcctgcgcctccggccattgccagccagttacggattcaaatcaacgagcagatctacttctcccgtcgcgttcgttttgtggaagggaaaccgctgatgctggaagacagctatatgccggtaaaactgttccgtaatcttagcctgcaacatctggaagggagcaagtttgaatatattgaacaagagtgcgggattttgattggcggtaattatgaaagcctgacgccagtgctcgccgatagactgctggcgcggcaaatgaaggtagcggaacacacgccactgctgcggatcaccagcttgagttatagcgagagcggggagtttttgaattatagtgtgatgttcagaaatgccagcgaataccaggtggagtaccatttacggcgactccacccggaaaagagttaaccgatactccagaagagcaccgccagtaattggggggtgataatgcgcaggaacattaccaacggatagacagtggcgtaagagagcgccgccgcaccgctggttggatgaagattattagcaaacgccagcgccggaggatcggtcatggaacctgccagcatcccgcacatggtcaggtaattcattttggctaacatccgcgccagaatgccaacagtaatcagcggaacggcggtgatcagggcaccataaccaatccagcttagcccttcgccattgaccagggtattcacaaaatccccaccagatttcagaccaacgacgctgaggaacagcacgatccccagctcccgcagcgcgaggttggcgcttggcggcataaaccagtacagcttgccgatactgccgatacgcccgaggatcaacgccataatcagcggtccgcccgccagccccagtttcaacgcggccgggaatcctggcacaaagacgggaatagaacctaacaatacgcctagcccgatgccaataaacactggcagcatctgaacctgttgcagtttttgctgcgcattccccagcacattggcaacggcatcaattgcggacggacgccccaccagattgaggatatcgccgaactgcaggctgatatcgccactggcgaccagttcgaccccggcacggttcaggcggctgataacaacgtcatagcgttctttaaagtgcaggtcgcgaatacgttttccgagcacgttttcattggtgaccaccacacgctcgacgcgcaaatcagtgcctttcgtggacaggctagtatcgacctcctgaccaatcaccagttgcgcattatgtaaatccgctggctgacccaccagatgcagcaaatcgcccagttggataatggtatctgggctaggaacttttagggtttcttcgcgtttcagacggctgcagataattttgtcgccgttgagaatcggtacatctttaatggctaaatcatgcaggttagggttctcaacgcgaatattgatagtcttgatcagcgcgccgccattggtgcgactagactcgtgctgctgagcttctgtctcgacattgacgcggaaaataacccgcaacatccacatggtgaacaaaatcccgcaaatgccgaatggatacgccatcgcgtaactcatccccatctgatcgaccatttccattggtgtacccaggtcgcgcaaaatctgctgccctgcccccagcgctggcgtattggtaaccgcaccggagaaaatccccagcactaccggcagtggaatatcaaacagtttatgcaggatggcggtaaccagaccaccgatgatgacgatcagaacagcaaacaggttgaggcgtaatccggagacgcgcaaactggcaaagaagcccggccctacctgaatcccgatagtataaacgaacaggatcaggccaaattcctgaataacatgcagcatatcgctacttaatgtcatccccgcctgagaaacaaaatggccgacgatgatcccaccaaacagcacgccgccaatacctaatcctatgccgcgaaatttgacgttgccgataaacaaaccgacgactgccaccaaagccagaatactgaccgttaatgctatatcactcatcgtccatttctcttgagataacattttaattgctacggattatggctgaatcggtgaagcagatttgccttatagcgcacattatcacgggaaagaacgtgccgaaatatcttaaacagtcgaaatttaacgcattgttgagtaagtaagacaaaaaaagccccaccagaatggcggggcaaagagaatagctagttagctatttaacgcgggacgttcgctgatagcgatacgctgcgctgcgatgggttcaggctcattacgaattaaatcaatatgcagtaaaccgtttacgaaggttgcgccagagacttccatattttcagccagcgtaaagctcaggctaaatggctgattcataagcccttgatgcagccattttttctcttcttttggctgctccggcgtgccttttacgctcaggcgcgtaccttccagttgaatctctaaatcttcctgacggaaacctgccagcgcaagggtaatgcggtagtggttatcgtcgcttttctcaatgttgtacggcgggaagctctggctttcaccggcgttttgcagtgcgttggccagtttgtcaaaaccgatccattgacgcatcagtggggataaatcgaagttacgcatagtcatttctccttctaagaagcgagtaagtacctgcaaatccgaagattcgcatatgctccctgacggcgagcatggagatgtcaggccgcgccaggcggccttagggaattagttgatttcgatacggcgcggttttttcgcttccggaatcacgcgttcgagatcgatatacagcaaaccatttaccaggttagcaccacgaacatgaatgttctcagctaactggaatttgcgttcaaagttgcgttcagcgatgccctggtacagataggtgcgctctttttgttcgtcggcgtgagcacctttcaccaccagcagattatcctgggcggtaatttccagttcgctctcagcaaaaccagccacagcgatagcaatgcggtaatggttttcgtctaccagttcaacgttatacggagggtagccgccattactctggctctggttgttttctaagtggttaaacaaacggtcaaatccaatagcagaacggtaaagcggggataaatcaaagttacgcataatcaatagctcctgaaatcagcgagaatgtaagaccttccacaatggacaggtcaggtagccagaacacccatcaggcgcgtcctcatcggctacgatgtaaaaatgggtctggaaatgaacttttcaagccttatcagcggacttttttttgcagtttatggtctattgcatagactgagggggcagcacgaaacgttaaagtgcgatagccgccacagtgcgacgtaatgatgatgttattttcagcaagggatcgctataactcatcaggccaacacccacgatcaacagatgaatttattatgataagaaatgtgttgttagcgttcatgatatgcagcggaatgacattactcggaggatgctccagcgtgatgtcccataccggagggaaagaaggaacgtatcccggcacccgcgccagcgcaaccatgattggcgacgatgaaaccaactggggcactaagagcctggcgattctcgatatgccgtttaccgctgtgatggacacgcttttactgccgtgggatgtgttccgcaaagacagcagcgtgcgcagccgcgttgaaaaaagcgaagccaacgcgcaagccaccaatgcggttattccaccggccagaatgcctgataactgatttagcgatcagtttcggtgatccacagctggccgccttccatccacgccagccactgaccatccgggctgaagaccacggcgtccgcagaaggactattggcgtggtgttcggttaaatactcaacctcgccgctttgcgcatgggcacaagcaattcgattatccagcacaaagcccaaccattctccactcggatgccagttaaatgcagactgaatatccgttttgttatgggttaactggcgcggctcgccgccctgtgggctgataagccacagttgcacaatgccgttatcatctcgcattaaaaacgcgatttgtgtaccctgcggattacagcgcacccagtggcgcgggacgttgactaaccccggataagcccgatggtgggtaaaggttaaacgtcgctgcacgacgccacgcggtggcgcgggcagggttgtttccgttccgcttaacggcgcatcacctgccgctttccagccagcttcatcttgcggtaactcaacgataaacagctccggcactttctcgccctttgggctaagtgtgtcgccaataaatgccagcgcgtgatttcctacccatccttcttcataagcacgattgatttcatcactgccaggctgtggcgtgggcgtggttttgctcaccagcacgcaccagtggctaccgctgtattcacgcggatgctgcttttgtacgttgaccgggccaaacggcgcagcaacaccgacgtttcgcaaatccagcgccggatcgagttcatgcattacatggtcgttataggtaaagctcaccctttcaccgttcgggctaaagacatgcacatggctgccgccgcgcagcactcctggcgtatacggcgcggtaatatccatcgcatcaaggttactcatcttgccgccttcaacaatcactccgcgccgatgatggaagtcgtaatgccatgtttcatcaggattttccgggccgtggatgaaaacatatttctcactcttcggatgaacggtcaccacgccgacgtgtgcgccctgactcgcgcgatagataacctcgacctcgccggtatggatattcacacgctcaatggtctcgccggtaaagctcgcgccagaaggacgcacgtcaaataccagccactggctgtcgggcgtccaggtattggtattggtgagcaggtgattacggggagcaaaggttatctgtttcatggcgcggtcctgatacaaaacgggtcccgccatcatacttcacaaggacttcactttcagacaatagtcttttgccatcgtgatgaatgtgagtgaaaagatggaacatttcgacgtggcgattattggcctcggcccggcaggaagcgcgttggcacgaaagttagcaggcaaaatgcaggtgatcgcgctggataaaaagcaccagtgtggtactgaaggtttcagcaaaccctgcggcggtctgctggcaccggacgcgcagcgatcttttattcgcgatgggctgacgcttcctgtcgatgtgatcgctaatccgcagattttcagcgtcaaaaccgtcgacgtcgccgcaagcctcacgcgtaactaccagcgaagctatatcaatattaatcgccatgctttcgacttgtggatgaaaagcctgatccccgccagcgttgaggtttatcacgacagcctgtgccgaaaaatctggcgtgaggatgataaatggcatgtcatttttcgtgcagacggctgggagcaacatattaccgcccgctatctggtcggtgccgatggcgcaaacagcatggtgcggcgacatctctacccggatcatcaaatccgtaaatatgtcgctatccagcagtggttcgcggagaaacatccggtgccgttctactcctgcatctttgataatagcataactaactgttatagttggagtatcagcaaagacggttattttatctttggcggtgcctatccaatgaaagacggtcagacgcgtttcacgacgctgaaagagaaaatgagcgcctttcagttccagtttggtaagacggtgaaaagcgaaaaatgcacggtgctgtttcccagccgctggcaggattttgtctgcggtaaggacaacgcctttctgattggtgaagcggcgggatttatcagcgccagcagcctggaggggattagctatgcgctggatagcacagacattctgcgtagcgtgttactgaagcagccagagaagctcaataccgcttactggcgcgccacccgcaaactgcgtttaaaactcttcggcaagatagtaaaaagccgatgcctgaccgcaccggctttaagaaagtggattatgcgcagtggtgtggcacatattccacagttgaaggattaaccaacgcgcttcacatcgcccaccagcaggatataagagagcgcgccaatcaacgcgacggcggagatataaaccagtgcaggtgcgaaaccgtaaccctgcgccaggtaccccaccaccagcggaacggtgatgccgcccagaccaccggcgaagttaaacacgccgccggttaaaccaatcaggcgcatcggtgccagagaagaaaccaggctccaggtaatgctagcaaaaccgttaccgaagaatgccagcgccatcaggcacataatcatcatcggatcgttagtgtagttagcgcccataatgcaggtggagatcagcaagccgcagataatcggcgttttacgcgcaaagcccagactaaagcccttacgtaccagcagatccgctacccagccagagagcaggacgccgacaaacgccgcgaggaatggcaccgtggtcataaagcctgctttcagcgccgtgattcctttttcctgggttaaatagttcgggaaccaggttaagaaaaaccacagtgtagaagccaccgcaaattgcccaagataaacgccgatcagtttacgatggaacaccagtttccagtctttggctgttaacggctgacgcgcctctttcttcaccggcgcatcaccatccaccagaccgccgccatcacgaatgtaatccagttcagctttgctgatacctttggtcaggcgcggcggctgataaaccttaaaccaaatcaggctccagataatgccgataccaccagtgacaatgaacacccagtgccagctcaacatctcctgaatccagatcagcagcggcgtcagaaacgccagaccgacaaactgaccagacgtataaaaaccaacggcagaagcgcgttcatgttccgggaaccagctggtcaccatccggttattggtcgggaaagcaggcgcttcgaaaataccggttatcgcgcgcagaccaattaaactcattaagcccgtggcaaagccctggaataaagtcgccacactccagccaaatatcgcaataaaataagtcacgcgagaacctacgcgatctaaaaaccaaccgccggggatctgacatagcgtataaagccaggcgaaggcgctaaatacatagcccatttccgctttggtaatgccgaactcttcctgaatatgggcggaagccacggccaggttggcgcggtcgacataacaaatgactaccgtaataaagatcatcaccagcgtcagataacgccgacgccccggctttgctgcattaacgggaatatccatagcgagctttctccagattttgggcatagcgaagccgctcaccatgccctgtaatttacagagggttatatttttgtattgctgttttagtgcccgatgaggggcttacgtggcaggaattaccactctgctacgctgttatcttcatgacgccagagcggattacgccagtccggggcatttttactgaactcaatcactttagcttcgtcgatttccacgcctaagcccggtttcgttaacggtttaaagaagccgccgaccatgctgaagtcttctttgtttttcacaaagtcgagtaactccgcgcctttgttgtaatgaattcccatactttgttcctgaagtacggcgttataggaaacaaagtcgatatgcaggcaagccgccagtgcaatcggtccgagcggacagtgcggcgcaagggtcacgtcataggcttctgccattccggcgattttgtagcattcggtaataccgcccgcgtgggagagatccggttgcagaatgctaataccacctgcctccagcacgcgtttaaaatcgaagcgactgaacatgcgttcacccgccgccagtggaatatgcgtttgtgccgccagtttcgggtagtattcggcttgttccgccagcaccggctcctcaataaacagcgggcgatacggctccagttctttaatcagcactttcgccatcggcgcgctgacgcgaccgtggaaatcaagaccaaactcaatctgattgccaaaagcttcacgaatttgtgccacggtgttaaccgccgcatctaccgcgcgggagttatcaattagccccagttcttcacaaccgttcagtttgaaggtatcgaagccgatttcgcgtagcgttttaatgccgtcgataacatccgccggacgatcgccgccaacccaactgtaggctttaattttgtcgcgaaccaggccgcccatcagttgccagaccggcgcattcagcactttacctttgatatcccataacgcctggtcaatcccggcgatggcgctcatcaggatcggaccgccgcgatagaatccggcgcgatacatcacttgccataagtcattgatgcggcttggatcctgaccaatcaaatagtcacccagctcgtgaactgccgcttccaccgtacgggcgcggccttcgatcacgggctcgccccaaccgaccacgccttcatcggtttcaattttcaggaacatccagcggggaggtaaacgatacgtggtaattttggtgattttcattgcactgcctctcgatacgccttaacaaatgctgctgcctgctgcgcggtgcgctctacggattgcccggcgcgatagagatcgctgcctaagcccgcccctgcacaacctgcgtctatccactgcgccaggttttctggcgtcacgccgccaacggcaaagactgcgatgtcgcttggcaataccgcttttaacgctttgatgtattgcggaccaaaagcgctactcggaaatattttcagcgcctgcgcgcccgcttcgagcgcggtaaaggcttcggtcgccgtcgcgcagccggggcagacggtcatgccgtagcccaccgcacggcggatcacttcactatggatattgggcgtaacgatgagctgacagcccatcctggcgagcgcatcgacctgttcaggtttcagtaccgtacctgcgccaatcaacgccttgtcgccgtacgcatcaacgatggcgggaatgctttgctcccattgtggggaattcagcgggatttcaaccgcgtcgaacccggcgtcaatcaccgcgccaacatgcgccagcgcctcgtcgggcgtaataccgcgcaaaatggcgatcagcgggagtttagtttgccactgcatgagcgatgctccttataccagcctgaaatgccgtgtcgcccgccaccgccgtcacgtcgcaacccatcgcctgaaaggcttgctggtagcgcgcggtcaggcttgttccggcgacaagggtgatggcgtgttgatgggccacatagtcgcgcatactggcgacctctgcgccaatcaacaaaccagagagaaattcgctgacctgttcgcggggaagtgttcccagcacatggctggcgcgaacttcaaaaagctgcggcaatatggcgggcgtattaagaccacgctcaaggccagctgtgaaggcatcggcagagttttcctgcggcggcaaacctgcgccaatcaaactgtgatttaacagtaaatgatgtaattcaccggtcatcacggtgcgaaaatcgttgatttgctggctatcggcctgcacccatttgcaatgggttccgggcatgacataaagagaggaaggagccagagctcgcgcgccgatcaattgtgtttcttcgccgcgcatcacattgtggttatcgtcatgagagacacataatccgggaataatccagatattgtcgccaacactcgttaattgttcgccaatagagctaaaacaggcaggaacagataaatacggtgcaactttccagccgacgttgctgccaaccattcctgccattaccactggcgttttctcttcacgccagtcggtcgtgacttctgctaacaccgcagccggagattttccgttcaggcgcgtgacgcctgcttcactttgcctgctctccaggcagtggtcgccctgataaagccaggcgcgcagattggtgcttccccagtcaattgcgatgtagcgagctgtcatgtgatttcctttaaccttcgtgtgctgctggcgatcatggtaagcgccgcctgctctgccgcatcgccgtcctgatgtcgtatcgcatcgaacagcgccttatgttcctggagcgtttgcggcatgttggcctcatcgcccatccaggttcgttcaaaaaccgcccgctgcaggctactgatcgcaatgctaagttgctgtaacaccgggttatgcacgctctgcagcaccgcctcgtggtagcgaatatccgcttcgttaaacgcttcgcggtcctgattgttggcaatcatctcgttcagcgcgctttcaatctgcgccagatcgctggaagtcgcgcgctctgctgcccaacgggcaatcgccggttccaccagatttcgcacttcgctcatggcactgataagccgtgggtcgtagtcattttccagcacccattgcagtacgtcagtgtcgaggtaattccactggttacgcggtgccacaaacgccccgcgataacgtttcatttcaatcagccgcttcgccatcaggctacggaacacctcacggatgatgttgcggctggttgcaaactcctcacagagttccgcctcagccggaagcgggctgcctggcacgtatttgccgtgaacgatctgtttacccagcgtaatgacaatgcgatcggttttattgagagtcatggagagtccttgtgctctgtatgttcttctctactttaccccgatcgatgcataacgcggcaactttgtagtaccagcgtgatgacgttcgcgtttgccgtgcgtgtaatgtagtacaaacttatattgttgtactacaatttagatcacaaaaagaacaatgcataaaaaaatgacatgcgtcgggcagaaatctgaaaagggatatcaggcgctaaacaggagggaaagaagagtatgctttcaacggcttagctactcgtttaaaggattaatcatgaagttgaattttaagggattttttaaggctgccggtttattcccactggcgctgatgcttagtggctgtatcagctatgctctggtttcccataccgcaaagggtagtagtggaaagtatcaaagccagagtgacaccatcactgggctaagccaggcaaaagatagtaatggaacaaaaggctatgtttttgtaggggaaagcctggattaccttatcactgatggtgccgatgacatcgttaagatgctcaatgatccagcacttaaccggcacaatattcaggttgccgatgacgcaagatttgttttaaatgcggggaaaaagaaatttaccggcacaataagcctttactactactggaataacgaagaagaaaaggcactggcaacgcattatggttttgcctgtggtgttcaacactgtaccaggagtctggaaaacctaaaaggcacaatccatgagaaaaataaaaacatggattacagtaaggtgatggcgttctaccatccatttaaagtgcgattttatgaatactatagtcccagaggcattccggatggtgtttccgcagcattactgccagtgactgttacgctggacatcattactgcaccgctgcaatttctggttgtatatgcagtaaaccaataatcagtaagcgggcaaacgcgtttatgctgtttgcccgcccacagattaattcagcacatacttctcaatagcaaacgccacgccatcttcaaggttagatttggtgacaaagttcgccacttctttcacactaggaatagcgttatccatcgccacaccgacgcctgcatattcaatcattgcgatatcgttttcctgatcgccaatcgccatgatttcttccggtttaatacctaacacgtcggccagacttttcacccccgtacctttgttaacgcgtttatcgaggatttcgaggaagtacggcgcacttttcagcacggtatatttctctttcacttcctgcggaatacgcgcgatagcctggtcgaggatggcgggttcatcaatcatcatcactttcaggaactgggtattggggtccattttctccgcttcgcagaacaccagcggaatggtggcaacgaaggattcatgcaccgtgtagtagctgatatcacggttggcggtgtacagcgtggtgcggtccagggcgtggaaatgagaaccgacttcgcgagagagtttttccaggaaacgatagtcgtcatagctgagagcagtttgcgccacggtgctaccatcagcggccttctgtaccagcgcgccgttataagtaatgcagtagtcgcccggctgttccatatgcagctctttcaggtagttgtgcacacctgcatacgggcgacccgtcgttagcacgacattcacgccacgggcgcgagctgcggcaatcgcatttttaacggcgggactaatggtgtgatcgggcagcagaagggtgccatccatatcgatagcaatgagtttaatagccatgagttccccaggtagattggttcctgacccatgctaacgcgattccgctcaaaaatcagtacaacacccgagggaaaagggggatgcaacgcgcgttgcgtgctccctttttgcttagcggaagagtttccctttcagcagttccatgcctgcggaaagcagatcgttattggcttgtggactcacttcaccttgcggactgagcgcatcaataatcttcggcaattgttctgccagtaaactggaagctgtactggtatccacgccaagtttttgcccgagatcggacaccgcatttgtgccgagcgcgctttccagttgctcgccactaacgctttgattgccctgttgattactcagccaggtactgagaatggcccctaagccgccactttgcagtttttccagcagcacctgaatgccgccctgctcctcaacccaacttaaaatagcctgatatttccccgcatcgcctttcagaaaggcaccgacaacttcatcaaaaagccccatgataatcacctgtaaagcgttacgtgttgacccaaaaagtatagatttgcgggatgataattgcggattgcagaaataaaaagggcggagatgatctccgcccttttcttatagcttcttgccggatgcggcgtgaacgccttatccggcctacaaaatcatgaaaattcaatacattgcaagattttcgtaggcctgataagcgtagcgcatcaggcacgctcgcatggttagcgccattaaatatcgatattcgccgctttcagggcgttctcttcaataaacgcacggcgcggttcaacggcgtcgcccatcagcgtggtgaacaactggtcggcagcaatcgcatctttaacggtaacgcgcagcatacgacgactttccgggtccatagtggtttcccacagctgttccgggttcatctcgcccagacctttataacgctggatggagaggccgcgacgggactctttcaccagccagtccagcgcctgctcgaagctggctaccggctgacgacgctcgccacgttcgataaacgcatcttcttccagcaagccacgcagtttctcacccagcgtgcagatacgacgatattcgccaccggtgataaactcgtgatccagcggatagtcagtatccacaccgtgggtacgcacgcgaacaatcggctcgaacaggttttgctcagcattggtgtgaacatcaaacttccactggctgccgtgctgttctttgtcgttcagttcgctgaccagcgcgttcacccagcgggtaacggtctgctcatcagaaaggtcagcttccgtcaacgtcggctgatagataagctctttcagcattgctttcggataacgacgctccatacgattgatcattttctgcgtcgcgttgtactcagataccagtttctctaacgcttcgccagccaatgccggtgcactggcgttggtgtgcagcgttgcgccgtccagcgcgatagagatctggtactgatccatcgcttcgtcgtctttaatgtactgttcctgcttgcctttcttcactttgtacagcggcggctgagcgatgtagacgtgaccgcgttcaacgatttccggcatctgacgatagaagaaggtcaacagcagcgtacgaatgtggctgccgtcgacgtccgcatcggtcatgatgatgatgctgtgataacgcagtttgtccgggttgtactcgtcacgaccgataccacagccaagcgcggtgataagcgtcgccacttcctgagaagagagcatcttatcgaagcgcgctttctcgacgttgaggattttacccttcagcggcagaatcgcctggttcttgcggttacgcccctgcttcgcagagccgcccgcggagtccccttccaccaggtacagttcggaaagcgccggatcgcgttcctggcagtctgccagtttgcccggcaggcccgctaagtcgagcgcacctttacggcgggtcatttcacgcgcgcgacgcgccgcttcacgggcacgggcagcatcgataattttgccaaccacgattttcgcgtcggttgggttttccagcaggtattctgccagcagttcgttcatctgctgttcaaccgcgcttttcacctcagaagaaaccagtttgtctttggtctgggaggagaatttcgggtccggcactttcacggaaacgaccgcaatcaggccttcacgcgcatcgtcaccggtggcgctgactttggcttttttgctgtagccttctttgtccatgtaggcgttcagggtacgggtcatcgccgcacggaagcctgccaggtgagtaccgccgtcacgctgcggaatgttgttggtaaagcagtagatgttttcctggaagccatcgttccactgcaacgccacttcgacgccaataccgtctttttcagtggagaagtagaagatattcgggtggatcggcgttttgttcttgttcagatattcaacgaacgccttgatgccgccttcatagtggaagtggtcttctttgccgtcgcgcttgtcgcgcagacgaatggaaacgccggagttgaggaagctcaactcacgcagacgtttcgccagaatttcatattcgaactcggtcacattggtgaaggtttcgaggctgggccagaaacgcaccatggtgccggttttttcagtctcgccggtaaccgccagcggggcctgcggtacaccgtgttcgtagatctgacggtgaattttaccctcgcgctggataaccagctccagtttttggctcagggcgtttactacgctaacaccaacgccgtgcagaccgccggacactttataggagttatcgtcaaatttaccgcctgcgtgcagaacggtcatgatcacttccgccgcgcttacgccctcttccgggtgaataccggtcggaatgccgcgcccgtcatcctgtacagagacagagttatcggcgtgaatggtgacgataatttctttacagtgacccgcgagcgcttcgtcgatagcgttatctaccacctcgaataccatgtggtgcagaccggtgccgtcatccgtgtcgccgatatacatacccgggcgcttacgcaccgcatccagccctttcaggactttgatactggaggagtcataagaattgctcatcaacgtttctcgctcatttatacttgggttaatccgttattttacccttttccacggtaaacatcttgctattttcgtcgctcatgtctataacgtgttcagcactgatcgcgctgacaaagacctgactttgcgtcgcttttaagcggctggcaagcagcccgcgacgctcatcatcaagctcagaggcaaaatcatctatcaggtagagacaccgccgcccgctttcacgggtgaggaactctccttgcgccagacgtaaggcgcacatcaacagcttaagctgcccacggcttaaggtatcttccaccggcgcaccgtcggcgcgaatgcgtaagtccgctttgtgcgggccgtgcgcggtgtaggttagctggcgatcgcgttcaaaattacgttccagcacctcagcatattctgtctctttctcccagccgcgctggaaagagaaagtcagagaaaactcagggagaaattgcttacaggtatcagccatatcggccgcgataccggcgctatactccgcgcgccaggtgctgatttgctccgccagcgggatcagctctttatcccacgggcgtagctgttcgtaacgtgtcacctggcgcagcgccgcattgcgctgcttgagcaatcgcttgagattgctccaggcggtgaaaaatccgggttcgttgtgaaagcatccccagtcgaggaatgctcttctgtatttggggccgccgttgagtaaagtaaacccttctggcgttatcaactgcattggcatcaggtgcgccagttccgcgaccttatgcccgtctgtaccgtcgatgcggactttgctgtcgccctgtttgtctttggttaagccaatcgctgtctcgcgctcttcgccctgtaatcgcccgtggagaacaaacgcctcctgctcatggcgaatgacgcgaccaatctgcaaactgcgaaacgcccgaccatggccgagcgtatagatggcttccagcacgctggttttgccactgccgttggcgcctaccagaaagttaaagccgggagataaggcgagatccgcggtttcaatgttgcggaaatcgcggatcaacaagcgggtgagggacattacagtctcattggcatgacaacataagccgcgctctggctggccgcatcttcaatctgcacgctggaaacgctatcggtcagcatcatgcggacgttttcgcatttcagcgcgttcagaacatccagcacataactgacgttgaagccgatttccatctccgcaccgctataggtaacgtcgaggatctcttccgcttcttcctgttccgggttgttggcggtgattttcagctggttttcgctgacataaagacgtacgccgcggaatttctcgttagagagaatcgccgcgcgagcaaacgcctgcttgagcagatcgcagccagcttccagatgtttgtccgggttcttcggcagaacgcggcgataatccgggaagcgaccatccaccagtttggaggtgaagataaagtcgccaacgtgggcgcgaatgttgttgctgccaatctgtacgcgcagcggattgtcgccgccgtcgagcatacgcatcagttcaatcacgcctttacgcggtacgatcacgctatggcttggcaaagattgaccaattggcatactacagaccgccagacggtggccgtcggttgccacggtgcgcagttcttcaccttcggtttcaaacagcataccatttaagtaatagcgaacgtcctgatgcgccatagaaaactgggtcgcttcaatcagacgcttcatcgttgcctgcggcagggtaaattcgacttcactctgccagtcatcgaggttcgggaaatccgccgctggcagggtagacaggctaaaacggctacgcccggagcgtaccagcatccgttcaccttccagctgcacggcaatttccgcgccttcaggcagaccacggcagatatcaaagaatttgcgcgccggaacggtcgtcgctcctggctcgtgtggctgaaccagcgcaacacgtgccaccatttccatctcgagatcagtaccggtcaggctcaacgtaccgtcagcaacctgtaacagcagattaccgagaatcggtagcgtaggacgaccacctaacggaccgctcacctgttgtagcggttttaataaatgctcacgttctacggtaaatttcataggtttagctactcaatgttctgattaaattactaaaatcttctttgatatcgtggctctcttcacgcaactgctcgatcttacggcaggcatgaagcaccgtcgtgtggtcacggccaccaaacgcatcgccaatctccggcagactgtggttagtcagctctttcgccagcgccatcgccatctggcgcggacgcgccacgctgcgggatcgacgcttggaaaggagatccgcgactttgatcttgtagtactccgccaccgtcttctgaatattgtcgatggtgaccagtttttcctgcaatgccagcaagtcgcgcagcgcctcacgcacgaagtcgatggtgatcgcccgtccggtaaagttggcattggcaatgacgcggttcagcgccccttccagctcacgtacgttagatcgtagacgcttggcgataaagaacgccacttcgcccggcaaacgaatgtcgttttcgtcggcctttttcatcaggatcgccacacgggtttccagctctggcggttcgatcgccacagtcagtccccaaccgaagcgggatttcaaacgatcctcaacgccgttgatctctttcggatagcgatcgctggtgagaatgatctgttgattaccttccagcagggcgttgaaggtgtggaaaaactcttcctgagatcgttctttattagcaaaaaactgaatatcgtcgatcagcagtgcatctacggaacggtagtagcgtttaaactcttcgatcgcgttgttttgcagggctttaaccatgtcctgaacaaagcgctcggagtgcatataaaccactttggcattcggcttgcgcgccataatgccgttacccaccgcatgcagcaggtgagttttacccagacccgtgccgccataaaggaacaacgggttataggcaccgccagggttatccgccacctggcgagccgccgcgcgcgccagttggttagatttaccttcaacgaagttatcaaacgtgtgtttgacgtttacgttagaacgataggtcggttctgccggggccgggacgttatcccaaccactgcgcgtagaaggcgcagcacgttgcggctgcgtttgcgccacctgtgcaggggccgcgacgttgctcgtcactgccgcttgtggcgtttgcgtcaccggtttggtgccgacttcaaaacgcagctgtggggcatccgctccgcagaaactggttagcagtccattgatattattaaggtacttgtcccgtacccaatcgaggacaaaacggtttggcgcgtacagggccagcgtgttatcgctcagttccgcctgcaatgggcgtatccacatactgaattctgtggctggtaactcatcctgcaatcgggcaagacactgctgccaaaggctaagactcacggcggactccactcgaacaaaagtcgataatgactaaggctgaaacattcatgattgttgacgtacgtcgaaaagaccctgcttgagggtgacgcacgaaccgctgtctgcggttatatgcccgatcaagatcctgcaaaacgatcgggaccgcggatcatagcctaaactgcgcaagagatcttctgtttctcacagattttcccgatttatccacaggactttccagaactcgctaagtgtaaacgatcctgccgcgaggcgggcacgatttacgccgcatattggaaaatttaatgaccatagacaaaaattggcttaatcgatctaataaagatccaggacgatccttgcgctttacccatcagcccgtataatcctccacccggcgcgccatgctggtttccactggtgtgaggtcgtacattttccctgcgaaaaggtgcggaaaagcgcggtaaataaggaaagagaattgactccggagtgtacaattattacaatccggcctctttaatcacccatggcttcggtgtccatcgtttcatttttcggcggatatccaataaagccattgaatttattcaagtttaggtagaaatcgccatgaaacgcacttttcaaccgtctgtactgaagcgcaaccgttctcacggcttccgtgctcgtatggctactaaaaatggtcgtcaggttctggcacgtcgtcgtgctaaaggccgcgctcgtctgaccgtttctaagtaataaagctaacccctgagtggttaagctcgcatttcccagggagttacgcttgttaactcccagtcaattcacattcgtcttccagcagccacaacgggctggcacgccgcaaattaccattctcggccgcctgaatagcctggggcatccccgtatcggtcttacagtcgccaagaaaaacgttcgacgcgcccatgaacgcaatcggattaaacgtctgacgcgtgaaagcttccgtctgcgccaacatgaactcccggctatggatttcgtggtggtggcgaaaaaaggggttgccgacctcgataaccgtgctctcagcgaagcgttggaaaaattatggcgccgccactgtcgcctggctcgcgggtcctgacttaatcggaagcgttggaaaaattatggcgccgccactgagccctggcagccgggtcctgatagccctcattcgggtctatcaacgcctgattagtccgctactcgggccgcattgtcgtttcactccaacctgtagtagctacggaattgaggcattgcgcaggtttggagtgataaaaggcagttggttgacggtgaaacgcgtattaaaatgccaccctttacaccctggtggtgacgatcccgtcccgcccggaccatttgataccagagaacactaacgatggatagccaacgcaatcttttagtcatcgctttgctgttcgtgtctttcatgatctggcaagcctgggagcaggataaaaacccgcaacctcaggcccaacagaccacgcagacaacgaccaccgcagcgggtagcgccgccgaccagggcgtaccggccagtggccaggggaaactgatcagcgttaagaccgacgtgcttgatctgaccatcaacacccgtggtggtgatgttgagcaagctctgctgcctgcttacccgaaagagctgaactctacccagccgttccagctgttggaaactagtccgcagtttatttatcaggcacagagcggtctgaccggtcgtgatggcccggataacccggctaacggcccgcgtccgctgtataacgttgaaaaagacgcttatgtgctggctgaaggtcaaaacgaactgcaggtgccgatgacgtataccgacgcggcaggcaacacgtttaccaaaacgtttgtcctgaaacgtggtgattacgctgtcaacgtcaactacaacgtgcagaacgctggcgagaaaccgctggaaatctccagctttggtcagttgaagcaatccatcactctgccaccgcatctcgataccggaagcagcaacttcgcactgcacaccttccgtggcgcggcgtactccacgcctgacgagaagtatgagaaatacaagttcgataccattgccgataacgaaaacctgaacatctctagcaaaggtggttgggtggcgatgctgcaacagtatttcgcgacggcgtggatcccgcataacgacggtaccaacaacttctataccgctaatctgggtaacggcatcgccgctatcggctataaatctcagccggtactggttcagcctggtcagactggcgcgatgaacagcaccctgtgggttggcccggaaatccaggacaaaatggcagctgttgctccgcacctggatctgaccgttgattacggttggttgtggttcatctctcagccgctgttcaaactgctgaaatggatccatagctttgtgggtaactggggcttctccattatcatcatcacctttatcgttcgtggcatcatgtacccgctgaccaaagcgcagtacacctccatggcgaagatgcgtatgttgcagccgaagattcaggcaatgcgtgagcgtctgggcgatgacaaacagcgtatcagccaggaaatgatggcgctgtacaaagctgagaaggttaacccgctgggcggctgcttcccgctgctgatccagatgccaatcttcctggcgttgtactacatgctgatgggttccgttgaactgcgtcaggcaccgtttgcactgtggatccacgacctgagcgcacaggacccgtactacatcctgccgatcctgatgggcgtaacgatgttcttcattcagaagatgagcccgaccacagtgaccgacccgatgcagcagaagatcatgacctttatgccggtcatcttcaccgtgttcttcctgtggttcccgagtggtctggtgctgtactatatcgtcagcaacctggtaaccattattcagcagcagctgatttaccgtggtctggaaaaacgtggcctgcatagccgcgagaagaaaaaatcctgattcggtgagttttcgctaaaataagggcggtcagttgaccgccttttttcttttcgtagggcggataagcaccgcgcatccgccacacaaagcaacaggaacatcatgagcgataatgacactatcgtagcccaggccacgcctccgggacgtggcggcgttggcatcctgcgcatctccggcttcaaagcccgtgaagttgccgaaaccgtgctgggtaaactgcctaagccgcgctacgccgattatcttccgtttaaagacgccgacggcagcgtgctcgatcaggggattgcgctatggttccctggcccgaacagcttcaccggcgaagatgtgctggaactgcaaggtcatggcggtccggtgatcctcgacctgctgttaaaacgcattctgaccattcccggcctgcggattgctcgccctggtgagttttccgaacgcgcgtttcttaacgataaacttgacttagcccaggccgaggcgattgccgatcttatcgacgccagtagcgaacaggcggcccgtagcgcacttaacagcctgcaaggcgcattctccgcacgggttaatcatctggtagaagccctcacccacttgcgcatttacgtcgaagcggcaattgatttccccgatgaagagatcgatttcctctccgacggaaaaattgaagcccagctcaatgacgttattgccgatcttgatgcagtgcgtgctgaagcacgtcagggtagtttgttgcgcgaagggatgaaagtggtgattgccggacgtcctaacgccggtaaaagcagcctgttaaacgcgctggcggggcgtgaagcggcaatcgtaaccgatatcgccggaactacgcgtgacgtgctgcgtgagcatatccacattgacggaatgccgctgcatatcatcgataccgccgggctacgtgaagccagtgacgaagtagaacgtattggtatcgagcgcgcgtggcaggaaattgaacaggccgaccgcgtgctgtttatggtcgatggcaccacaacagacgccgtggatccggcagagatctggccggaatttattgcccgtctgccagcgaaactgccgatcaccgtggtgcgcaataaagccgatatcaccggcgaaacgctgggaatgagtgaagtgaacggtcacgcgttaattcgtctcagcgcaaggactggtgaaggcgtggacgtgctgcgtaaccatctcaaacagagcatgggctttgacaccaacatggaaggcggcttcctggcgcgtcgtcgccacctacaggcgctggaacaggcagcggaacatctacaacagggcaaagcgcaactgttgggagcctgggcaggtgaactgctggcggaagagttgcgtctggcacagcagaacttaagcgaaatcaccggggaatttactagtgacgacctgctggggcggattttctccagcttctgtattggtaagtaaccgcgcttacgaggccgcattctgactgtcagatgcggcttcgcttcattgttaccactcctgttattcctcaaccctttttttaaacattaaaattcttacgtaatttataatctttaaaaaaagcatttaatattgctccccgaacgattgtgattcgattcacatttaaacaatttcagaatagacaaaaactctgagtgtaataatgtagcctcgtgtcttgcgaggataagtgcattatgaatatcttacatatatgtgtgaccagtaaatggttcaatattgacaacaaaattgtcgatcaccgcccttgatttgcccttctgtagccatcaccagagccaaaccgattagattcaatgtgatctatttgtttgctatatcttaattttgccttttgcaaaggtcatctctcgtttatttacttgttttagtaaatgatggtgcttgcatatatatctggcgaattaatcggtatagcagatgtaatattcacagggatcactgtaattaaaataaatgaaggattatgtaatggaaaactttaaacatctccctgaaccgttccgcattcgtgttattgagccagtaaaacgtaccactcgcgcttatcgtgaagaggcaattattaaatccggtatgaacccgttcctgctggatagcgaagatgtttttatcgatttactgaccgacagcggcaccggggcggtgacgcagagcatgcaggctgcgatgatgcgcggcgacgaagcctacagcggcagtcgtagctactatgcgttagccgagagtgtgaaaaatatctttggttatcaatacaccattccgactcaccagggccgtggcgcagagcaaatctatattccggtactgattaaaaaacgcgagcaggaaaaaggcctggatcgcagcaaaatggtggcgttctctaactatttctttgataccacgcagggccatagccagatcaacggctgtaccgtgcgtaacgtctatatcaaagaagccttcgatacgggcgtgcgttacgactttaaaggcaactttgaccttgagggattagaacgcggtattgaagaagttggtccgaataacgtgccgtatatcgttgcaaccatcaccagtaactctgcaggtggtcagccggttagtctggcaaacttaaaagcgatgtacagcatcgcgaagaaatacgatattccggtggtaatggactccgcgcgctttgctgaaaacgcctatttcatcaagcagcgtgaagcagaatacaaagactggaccatcgagcagatcacccgcgaaacctacaaatatgccgatatgctggcgatgtccgccaagaaagatgcgatggtgccgatgggcggcctgctgtgcatgaaagacgacagcttctttgatgtgtacaccgagtgcagaaccctttgcgtggtgcaggaaggcttcccgacatatggcggcctggaaggcggcgcgatggagcgtctggcggtaggtctgtatgacggcatgaatctcgactggctggcttatcgtatcgcgcaggtacagtatctggtcgatggtctggaagagattggcgttgtctgccagcaggcgggcggtcacgcggcattcgttgatgccggtaaactgttgccgcatatcccggcagaccagttcccggcacaggcgctggcctgcgagctgtataaagtcgccggtatccgtgcggtagaaattggctctttcctgttaggccgcgatccgaaaaccggtaaacaactgccatgcccggctgaactgctgcgtttaaccattccgcgcgcaacatatactcaaacacatatggacttcattattgaagcctttaaacatgtgaaagagaacgcggcgaatattaaaggattaacctttacgtacgaaccgaaagtattgcgtcacttcaccgcaaaacttaaagaagtttaattaatactacagagtggctataaggatgttagccactctcttaccctacatcctcaataacaaaaatagccttcctctaaaggtggcatcatgactgatcaagctgaaaaaaagcactctgcattttggggtgttatggttatagcaggtacagtaattggtggaggtatgtttgctttacctgttgatcttgccggtgcctggtttttctggggtgcctttatccttatcattgcctggtttagtatgcttcattccgggttattgttattagaagcaaatttaaattatcccgtcggctccagttttaacaccatcaccaaagatttaatcggtaacacctggaacattatcagcggtattaccgttgccttcgttctctatatcctcacttatgcctatatctctgctaatggtgcgatcattagtgaaacgataagtatgaatttgggttatcacgctaatccacgtattgtcgggatctgcacagccattttcgttgccagcgtattgtggttaagtagcttagccgccagtcgtattaccagtttgttcctcgggctgaagattatctcctttgtgatcgtgtttggttcttttttcttccaggtcgattactccattctgcgcgacgccaccagctccactgcgggaacgtcttacttcccgtatatctttatggctttgccggtgtgtctggcgagttttggtttccacggcaatattcccagcctgattatttgctatggaaaacgcaaagataagttaatcaaaagcgtggtatttggtagcctgctggcgctggtgatttatctcttctggctctattgcaccatggggaatattccgcgagaaagctttaaggcgattatctccagtggcggcaacgttgatagcctggtgaaaagcttcctcggcaccaaacagcacggcattatcgagttttgcctgctggtgttctctaacttagctgttgccagtagcttctttggtgtcacgctggggttgttcgattatctggcggacctgtttaagattgataactcccacggcgggcgtttcaaaaccgtgctgttaaccttcctgccacctgcgttgttgtatctgatcttcccgaacggctttatttacgggatcggcggtgccgggctgtgcgccaccatctgggcggtcattattcccgcagtgcttgcaatcaaagctcgcaagaagtttcccaatcagatgttcacggtctggggcggcaatcttattccggcgattgtcattctctttggtataaccgtgattttgtgctggttcggcaacgtctttaacgtgttacctaaatttggctaaatccttcaagaagccagccattcgctggcttcttgcctctcaggaaatcacttatgtccaaatggcaactcgcctgatcctccttcaccacgtatgctttgcgtcaccttactatcaggacgctttagcccatgtcccgctttttgatttgtagttttgccctggttttactttatcccgccgggattgatatgtacctcgttggtttaccgcgcatcgccgccgatctcaatgccagcgaagcgcagttgcatattgcgttctccgtatatctggcggggatggcagctgcgatgttatttgccggtaaagtggccgatcgtagtgggagaaagccggtcgccatacccggcgcggcgctatttattattgccagcgtgttctgtagtctggctgaaaccagcacgttatttcttgcaggccgatttctacaggggttgggcgcaggctgttgttacgtagtggcgttcgctattttgcgcgacacgctggatgatcgacgtcgggctaaagtgctgagtttactcaacggtattacctgcatcattccggtgttagcgccagtgctcggacatctgattatgcttaaattcccgtggcagagtctgttctgggcgatggcaatgatgggcatcgcggtactgatgttgtctttgtttattttaaaagaaacgcgcccagcggcccccgcagctagcgataaaccacgagaaaatagcgagagcctgcttaaccgttttttcctcagccgtgttgttatcaccaccctcagcgttagcgtgatcctcactttcgtcaacacgagtccggtattgctgatggaaatcatggggtttgagcgcggtgaatacgccaccattatggcgctgaccgctggcgtcagcatgaccgttagtttctccacgccatttgcgctgggaatttttaagccacgtacgttgatgatcaccagccaggtgttattcctggcggcggggatcactcttgccgttagtccttcccatgcggtttctctgtttggtatcacgctgatttgcgccggtttcagcgtaggttttggtgtggcgatgagtcaggcgttagggccgtttagtttacgcgcgggcgtagccagcagcaccttaggtattgcgcaggtttgcggtagcagtctgtggatttggctggcagcggtggttggtatcggcgcatggaatatgctgatcgggattctgattgcctgtagcatagtgagcctgttgctgattatgttcgtcgcgcctggacgccccgttgccgctcatgaagaaatccatcaccacgcttgatctcaatctgctgctttgtctgcaactgctgatgcaggagcgcagcgtaaccaaagcggcgaagcggataaacgtgacacctagcgcggtgagtaagagcctggcaaagttaagagcgtggtttgacgacccgctctttgtgaacagtccgctgggtctgagccccacaccgctgatggtcagcatggagcaaaatctggcggagtggatgcaaatgagcaacctgctgctggataaaccgcaccaccagacaccgcgcggcctgaagtttgagctggcggcggaaagtccgctgatgatgatcatgcttaatgcgctgagcaaacagatctaccaacgttacccgcaggcgaccatcaaattacgtaactgggattacgattccttagatgccattactcgtggtgaagtggatatcggtttttccggtcgcgaaagccatcctcgcagccgggagctgttaagcagcctaccgttagccattgattatgaagtgctgtttagtgatgtgccctgcgtctggttacgcaaagatcatccggcactgcatcaaacgtggaatctggacaccttcttacgttatccgcatatcagcatttgctgggaacagagcgatacctgggcgctggacaatgtgttacaggagctgggacgcgaacgcacgattgctatgagcctgccggaattcgagcagagtctgtttatggcagcgcaacccgacaatctgctactggcgaccgcgccgcgctactgtcagtactacaatcaactccatcaactgccgttggttgctcttcctctcccgtttgacgaaagccagcaaaaaaagctggaagttccttttaccctgctgtggcataaacggaacagccataatccgaagatcgtctggttacgggaaaccattaaaaacctttacgcgagcatggcataaccgaatcgtatgaaacgcgacccaatttcacaataaaatgtaaaaaagttgtaataagcttgtctgaatcgaacttttagccgctttagtctgtccatcattccagtaaatgattactcttgtattcataatggaccattaagcatggagcgaaaaatggcgactcactttgcccgagggattttaacggaaggacatctgatttctgttcgtctcccctcccagtgtcatcaagaagcccgaaacattccccctcatcgtcaaagccgttttctggcgtccagaggtttactcgcagaactgatgttcatgctgtatggcattggcgaattgccggaaatcgtcaccctgccgaaaggtaaaccggttttcagtgataaaaatttgcctagcttttccatttcctatgccgggaatatggttggcgtggcgttaacaaccgaaggtgaatgtggcctcgatatggaactacagcgtgcgacgcgcgggtttcatagcccacacgcgcccgataaccacacctttcccagcaatgaaagcctatggatcagtaaacaaaacgatcctaacgaagcgcgggcgcagctcatcacgctgcgccgaagcgtgctaaaactaaccggtgatgttttgaatgacgatccgcgcgatctgcagctgctgcccattgccggacgcctgaaatgtgctcatgtaaatcatgtagaagcgttatgcgacgcggaagacgtgctggtgtggtccgtggcggtcacgcccacgattgaaaagctcagtgtctgggagttagatggcaaacacggctggaaaagcctgccggatattcacagccgcgccaacaatcctaccagccggatgatgcgttttgcccaactctctaccgtgaaggcttttagcccaaattgatagacaaccacaggagtcatcatgtctgaaaaattgcaggtggttacgttactggggagcctgcgcaaaggcagttttaatggcatggttgcacgtaccctgccgaaaattgctccggcgagcatggaagtcaatgcgttaccatccattgccgacattcccttgtatgacgctgacgtacagcaggaagaaggttttccagcaacggttgaagctctggcggaacagatccgtcaggctgacggtgtggtgatcgtcacgccggaatataactacagcgtaccgggtgggctgaaaaatgccatcgactggctttcccgcctgccggatcaaccgctggccggtaaaccggtattgattcagaccagcagtatgggcgtgattggcggcgcgcgctgtcagtatcacctgcgccagattctggttttcctcgatgcaatggtgatgaacaagccggaatttatgggcggcgtgattcagaacaaagttgatccgcaaaccggagaagtgattgatcagggtacgctggaccacctgaccgggcaattgaccgcatttggtgagtttattcagcgagttaagatctaaataaaaaacccgccagcaatcatgcatggcgggtttttaacgcgctatcgattttagtgagcgtcgataaagacaatcttcaggataaacagcagcgcaacgatgattacgcacgggcttagatcacgcagacgtccggtaccgattttcatcacgcagtaggagataaagcccagcgcgataccttcggtaatgctgaagctgaacggcatcatcacggcggtaataaacgccggaacagattcagtaagatcctgccagttcacgcgtgccagactggaagtcatcagcacgccaacgtaaatcagcgcaccagctgcagcgtagcctggcaccatccccgccagcgggctcagaaagataaccagcaggaacagcagaccaacaaccactgccgtcagaccggtacgaccgccaacgcttacgccggaagaggactcaatataagccgtaacggaagaagtaccgataaagctaccggtcacggaagagatactgtcgacatacagcgcctgcttcatgcgcgggaatttccccttctcatccgccagacctgctttatcggtcacgccaatcagcgtaccggaggagtcaaacaagttgaccaacatgaaagagaaaatcacccctgccagcccgaggttaaagctcccggctaaatctacatgacccacaactgtcattacgctcggcggcgcagaaacgatgccattgtagtgcacatcacccagcatccagcccagcagcgtcgtcaccacgatagaaaccagcaccgctgcgtgaatgttgcggctggccagaatagcaatgatgaagaagccgaggatacccagaagtacgctgtgagaagtcagattaccgatgctcaccagcgtttccgggttagcgacaatcacacctgcgtttttcagccccatcatgccaatgaacagaccgataccgctggtaatacccacacgcagactcaccggaatgttggctatcatccagtagcgaacgcggaaaatcgtcagtaacagcagacctatcgcgccccagaagattgcgcccatcccgacctgccacggcaagcccatcgcctgtacaacgacaaaagcgaagaacgcattcaggcccatagcgggtgccagtgcaactggcaggttagcaaacagtcccatcataatactgccgaatgcagcgatcagacaggtagtgacgaagacggcgctggtatccatgccagcaacgccaagaatttgcgggttaacaaaaacgatgtaaaccatcgtcaggaaggtggtaaaaccggcgatcacttcggtccgtgccgtcgtgccatgttcgcgcagtttaaacacgcgttccagcatcccctgaccagaagtctgggtggtatgttgatgactcattatctatttccgaacaaggagggaaaatccgtcgctatcgtataccaaaatgcgacaataggcgcgtttgtgagagacttttttattggatttacttatacggcaacgattgcgttgcgcaaatcggctctacgaaaacgttaaactgattaaaaaggaaaggcatgtcccggatagaagcggtatttttcgactgcgacggtacgctggtcgacagtgaagtcatttgctctcgcgcatatgtaacgatgtttcaggaatttggtattacgctcgatcctgaagaggtattcaaacgtttcaaaggtgtaaaactgtacgaaattatcgatattgtttcccttgaacatggtgttacgttagcgaaaacagaagctgaacacgtttaccgtgcagaagtcgctcggctgttcgatagtgaactggaagccatcgaaggggctggagcgctcctgagtgcgatcactgcgccaatgtgtgtggtatctaacggcccaaataacaaaatgcagcattctatgggcaagctgaatatgttgcactacttcccggataaactgttcagcggctacgatattcagcgctggaagccagacccggcgttaatgttccatgcggcaaaagcgatgaatgtaaatgtagaaaactgcattctggttgatgacagtgttgccggtgcacaatctggtatcgacgcaggtatggaagtgttctacttctgcgccgacccgcacaataagccgatcgttcacccgaaagtcaccacctttacccatcttagccagttacctgaactgtggaaagcgcgtggttgggatattacggcataattcttcacactcccttcacttaccccgcttaaattggcgctcaaaggtaagtaaagggagtttgatatgtctgttagtcgtcgggtaatacatcacggactttattttgcagttttaggaccgttaattggtgttctgtttcttgtcctctacatattcttcgcaaaagaaccgctggttctttgggtgataatacatccaatttttctcttattgagcataactacgggagctattcctgcgttgttaaccggtgtaatggttgcctgtctgccggaaaagatcgggagtcagaaacgttatcgttgtctggctggtggcataggtggcgtcgttatcaccgagatctattgtgcagttattgtacatattaagggcatggcttccagcgagttgtttgaaaacattctttctggtgacagtctcgttgtccgcatcattcctgcattgctggcaggtgtggtgatgagcagaatcattacccgtctacccggattggatattagttgtcctgaaacagactctttaagttaagcgggatactttatctttgggctactcaaaagcagacaggatgtttctatgactcaaaatatcaggccgttaccccaattcaaatatcatcccaagccactggaaacaggcgcatttgaacaggataaaaccgtagagtgcgattgctgtgaacaacagacgagtgtttattacagcggtcccttttattgcgttgatgaagttgaacatctctgtccgtggtgtattgcggacggttctgctgctgaaaagtttgcaggtagttttcaggatgatgccagcatagaaggtgttgaatttgagtatgatgaagaggacgaatttgccggtattaagaacacatatcctgatgaaatgctgaaagagttggttgaacgcacgccaggttatcatggatggcagcaggaattctggctcgcgcattgtggcgatttctgtgtttttatcggctatgtgggctggaatgatataaaagatcgcctcgatgaatttgccaaccttgaagaagattgtgagaatttcggtattagaaattctgatctagctaaatgcctgcaaaagggtggtcattgtcagggttatctcttccgctgtctccactgcggcaagctgagactgtggggtgattttagctaattatttaaataatgagaacaggccggagcgtaattcacacatccggccttatttcttaagcttaaccgagtgctaattctgcggcagcggctttatcagcgattaccatcaggctaggatgcagctgcaacacggaagctggaacatcttcggtaaccggaccttgcagaacatttttcagtgcctgcgctttacccgcgccgctgacaattatcagcaagtttttcgccgccatgatgcttttcggccccatcgtcacgtagctgtcaggcactaagctaaagtcgccgcccaactcgccatgcgccacaatatcaaccatctctccctggatcgggaactccacggtttgctcatggaaatgggtcgtattcggcaaattgccacaaaaatgaccatctgcacctaatcccagcaccaccaaatccagtccgccttcacgcgccagtttctgatcatgctcgcggtagttatcaatagtgagcttctggatattctcttctttgatccccgcaggggtgaaaaacagattacgcagattggtaatcgttacgccttctccctctttgccgcgaaatggaatttcatcaaaattatagaaatagcagttatcgtaccagggcttacctttaaccagggtggtgaggtattcatacatgcctttgggcgtgctaccggcggtaattgccaggttaacacgacgcgtcttgctcatataaccaagcagatggtgtgccgcgacacggctcatttcctggtaatcttcggtaatgattaatttcatcttaatgccttattttatttaaataatttctgtacaaaggctgcataggctggtcgccagacatccatttcatggttcagacccggatattcctggtaatcaaagttaatttttttctgctcaagctcagttttcagcccggcgatatccttgccggttacgacatctttatcccccacaaccacagtaaaattacgtagttgctggttgatagctgccggatcgttcagtcgggccgcgacaccttcatccggtacggttgtcgtggtaacaccactgaatgtggccagccagccaaagctttccagatgattcattccggaaaccagcgcctggtacccgccttgactaagccctgccagcgcgcggccatcggcatctttacggacattaaaacgcttgctaatcagcgggataatatcgttcatcagttcgcgatctgccgctttagcattcagcggataaaagactttacgtctttcctgaggcacgaaatcttcgggaataatgcccttcgcatcggtttctgtatccgggatcaccaccagcatcggtttaattttcccttcagcaagcaggttatccatgatttgcgggatacgcccctgatcgatagcggaacgtccggtatcaccaaagccgtgatagaaatagagcactggcaaaggctcgcccatgccggtgtatcctggcggggtccagacatacatctgacgttcagattgcaatgcgttggagtggtaagttatggcgatcaaatcaccatgcgcaacagaacgcgtatccagataactgcctggcaccagaatcatactggagttaacctggcgctgaggattagtcattgcggtgcctgtatcaatgctgcgtacaccatcaacattgaaaaaatactcgtacaggttgcctttcaggataggtgtgcgccagctccagactcctgcttcgtctttggtcatcgggtgaatattgtccggaaccggaacacccaccactacagagacattttttgccccaggggcaaagtagcgaaaggtcacgctgttatcggcattgacctgagtcacatactgtttcaccgggatagtgggtgccgggctggctggcatatccgctgctatggcccactgagcagaaataccgctggcaatagccagcgttaaagcagcaatttttatattcatcgtaatattcctttcattaagttccattaccaccagatttcagcctgggcaccgacagcaaactggtcgtctttattgtcttcaaaggtgaagccatccagttcgttttccagggctttgatatacgtggcgtagaaacgaatttccggacggctggtcaacatactggtattgactttaaaggtatggaagagcgtggttttataaccagactcattaaatttattactattcgcatctttgttttgctgggtgaaatagcccagttcaacacctgtctggttatattggtcccaaatataggccgggcgaacaaccgcacgaatagattcgaaatcagagtgggcgcctgtttcgtagctatatatatcgttaccgaaggagtaaacaatcgcgttagctacaatgaaatgatcgccaatataggcttcgccctggctagtcagacgtaccgctgttccgccggtgtgatcaccataataacgaccattaaaggtggtaaatggacttgcgccagcataacggccaaagttactggcgatagagttattcgcgaccaggaaggagaattcgttgaagccacctttatcaaatttctgcgttaaagatgtgccaaacatccaggtatctttccagtcataatacccgttattatcctgattatctttttcgcttgcgctttcgtttgccgtgacataacgaccacttaccattaaggtggctttatcccataacgggatatctttatagcgtaaatcaatggtattggtattaatctgctgtttgttttgcaggctgcgatcgtaatcatcgacatcttcgcgaaccagcgcgatatcaattttacccggaccgactttccagttttccagacctacacccgctgcggcatcagtacgctgcgttttccagtcaagcatctggatttcaattttcggcgcaccgtgtttacccacccagaaatcagcctctggcgcaaagggcaggaaacctttggtggtaacgtacatatcggagaactgcatatagttctcgccaccggcgttatcgccaaaccagccggtagagtactgctgaccaacgttaccatccatcatcacaacggcatcaacccgtttgccgttttcgttgtagacacgttgttttaactgcaaatcaaaccagccggagtattcgttaccaaagcggcccagagaaccaatcgcccaacttttaggactaccatgagaggcggtcccccaaccagaacggtaatagccgttgtaactaaagccaatttcatctttcacaaatttactgaaatctttcagagtcatggaagaataaatgctgcctgtctcactggcatttttctcttcatttttgaccagtacagcatcaggttttgcggcactactggtcgggaacggattggcggcatacccttgatcattcgtacttacgctacgattcaccgtcgctggcgtatactttttcttctcttcatctttatactttttgagttcgctttgcgtttctcttaacgccttttctaataactcaaggcgttgttccaccgttaaactttcagccaaactttgtgcagaaaaggctaacggtgccattaataagatggcagaggtaataagatttcgtctaaacataatatccctttatggtgcaaagaaagaattaacgcatcgcatccagactgttctgaatgcgacgataattaaggtgctttaatggttattttttttaaactcagcccccgcgtcttgatcacctctgcataccatccgaagcttttcttgcgtgttcttgtgaggcttccttcgccattatcatcacgatccacataaataaagccgtagcgcttagacatttgactatgagatgcactgactaaatcaattggcccccaactggtgtaccccataatatccacaccatcggcaatcgcttcatttacctgtaccaggtgatcgtttaaataggcaattcgataatcgtcctgtatgctaccatccgcttcaacgctgtcttttgcgcctaatccgttctcgacaataaataacggtttttgataacgatcccaaagcgtatttaacagaacccgtaatccaaccggatcaatttgccacccccactcactacttttcagatgcggattggggatcatattcagtatgttgccctgcgcatttttattaatgctttcgtcgtgggaaacacaaccagtcatgtaataactaaaagagatgaaatcgacggtatgttttaaatcttctgcgtcactttcagtcatctcaatggtgatattgtggtcgcggaagaaacgctgcatatagccgggatactggccacgcgcctgaacatcaccaaagaacatccagcgccggttctcttccatggcctgcaacatatcctgtggctggcaggtgagggggtaaaccagcccaccgagaagcatattgccgattttcgcttcggggagcaggctatgacaggctttaactgcccgcgcactggcaaccagttgatggtggatagcctgataaacttccgcctcgccactctcttctgccagccccacgcccgtgaatggcgcgtgtaagctcatgttgatttcattaaacgtcagccataacgccactttatgttggtagcgagtaaagaccgtgcgggcgtaatgctcgaagtgatcgatgaccgctcgattagcccaaccgccgtagtttttcaccagcccatatggcatttcgtaatgggataacgttaccagcggcttgatccccgcctgcgccatttcatcaaacagccgatcgtaaaacgctaaccccgcttcattcggttcgacttcgtcgccctgagggaaaattcgcgcccaggcaatggaaatacgcagacaggtgaagcccatctcggcaaataacgcgatatcttccgggtaacggtgataaaaatcgatggcgacatctttgatattctctttccccaggatgcgcggttccatttttcccattacgccatgaggctgtaaatcactggtgctgatccctttgccatcttcctgccaggcaccttccacctgattggcagctgttgcgccaccccaaagaaatgtttctggaaatgctttcataattaactccttttatcgttagcgaatgatggataacagcggttcacctgcgcttatctgcgccgtgccgtggggtaatacgtccgtaaaatcatcgctattactgattaataccggcgtcgtcagatcaaatccggcctcgcgaatagcagggatatcaaaagaaatcagccgatcgcctgtattgaccttgtcacccacgttgacgtgagcggaaaagaatttgccgtccagttttacggtgtcgataccgacatgaatcaggatctccacaccatcatcactctcaatgccaatggcgtgtaatgtggcgaacaagctagcaattcgacccgcaaccggagaacgcacttcaccaacgctgggcagaatggcaatacctttacccaacaggccactggcaaacgtggtatcagcgacgtgaatgagcggcacaatctctcccgtcatcggactacagataccgccctgctcaggtggtgtaataacctctggtgttttctcttgcggggcaccctgcgctggctgacgtttagcggtgatgaaatgaagcatcaccgtaccgacaaatgcgcaaccgatggcaatgacaccgccaataacgctggcccagacggtgaaatcaattcccgtactcgggatggtttgcatgaaggtgaaaatacttggcaaaccaaaggagtagactttcgtttgcgcgtagccaataatggtggccccccaaagccccactgatacaggcgataacaaaggggtacttacgcggcaggttgacgccatataccgctggttcggtgataccaaacagactcgtcaacgccgcacttcccgccaccacttttttctgcgcatcgcgttcgcagaggaagacgccgagcgccgccccgacctgcgccataatggcgggcattaacagcgggatcatggtgtcgtagcccagcacggtgaagttattgatacacagcggcaccaggccccagtgcagtccgaacatgacgaagatttgccagaagccgcccattaccgcgcccgcaaatgcaggaaccgcctgataaagccagagataaccggcggcaatcagttcgcttatccaggtacttagcggccccaccagcagaaaggtgacgggtgtgataaccatcagacatagcaatggtgtgaagaaatttttgattgcgctcggtaaccacgcattaagtcggcgttccagaatgctgcacaaccaggcagaaaaaataatgggaataacgctactgctgtaattcaacaatgtgaccggaatacccaggaaatccagccccagcgcatccgctttttgcccgttctcgaaagcagtcagaattaatggatgcactaacgctccaccaatcaccatggcagtaaatggattaccgccgaagcgtttccccgcggtgtatcccaggattatcgggaagaaccaaaacaaggcatcactggcgctgaataaaattaaataagtaccactttgttcggtcgtccactgaaaagtgagcgccagagccagcatacctttcaagatcccggttgccgccatcaaaccgatcagaggcgtaaaaataccactaataacataaacaaagcggtttagcagattacctttatcatcattttccggtgcctgttgcgctttttcgtcaaggcctgccacactgttaaccgccaggaagacatcggccacatggttacctatgaccacctgaaactggccaccgctttccaccaccataataataccgggggtctttttcagtacctctgcttgcgctttgctttcatcctttaatttaaaacgtaatcgcgttgcgcaatgcatcagactcacaatgttatctgcgcccccgactcctgcgactatttttctggctaactccgtcataacttgccctctaccgctttgcggcaaaactccaaaaaaaaacctgaaaaaaacggcctgacgtgaatcaagcaatttttttcaggttttgcccgcttagtgcggtaacaatcctttactcagtaataatatttcagtgttctttgcgcacgcgctctatatttatggctaaaaacataatctctgcgggactaattttacgttgatactgcaaaccaataaaaatggcgatccgttccgcacattgccatgcttgcgggtaattttgttttactgcttgttgtaaactttcatcactatcgttaatactagcatgttcaagaatacgccaggataaaaacttcagatgtgtaaccagtcgctgataactcaagctttcttcctggtaattaaggctgaactgaaattttattaattgcagcatttcgcgcattaactgcgtgacacctgcaacatcctccatatttccgctcatttgggcactgaccagatgcatggcaataaagcccacttcatctttcggtaactgcacgcccaaccgtttatcaataatggttaacgcttcttcccctagctggaactctttcgggtaaagccgctggatatcccacagcaacgggttgggcagcaacacgttttgctgaaagcgtttaatcgcaaactggcaatggtcagttaggctgatataaatactgtcctgtaattttcccaagcgctcctgcgctaaagagataatacgatcacaggttgccatcacctcaagaggaatatgacttaagagttcgcttaatcgcccgttcagttcatgactgctcaaggcatactctttttctattccactactgttaattctttcgccagcgcgtttttgaaagccaattccgcgccccatgacgactttttcccgctgttgatcatcaataaccaccacaacattattgttgagaattttggtgatttgcatgttcatagcaaggaccttttttataaacaaaaaaacccgacttcaccagtattctctggttatgtcaggttttgcctgcgaatgcagtaacaatccagtcatttattaatggtttttataacgaacatccaggttcggaaattaatttaattgcgtgcagagaaaatagcaatgcgctattgataaaaatatgaccatgctcgcagttattaactttgtgtaattttaggaatttataaagttatatataacaaatcccaataattaagttattgggatttgtctggtgaattatttgtcgctatctttccccgccagcagtttatccagctcatcgccaccgacgtgacggaaatcctgccccttcacgtagtagaagataaactcacaaatattctggcagcggtcgccaatacgttcgatagaacgcgcgcagaacagcgcagtaagtacgctcggaatggtacggctatcttccatcatgtaggtcatcagttgacgaacaataccttcgtattcctgatcgacttttttatcttcacgataaatacgtaccgcttcgtcaatgtccatccgcgcgaacgcgtccagcacgtcgtgcagcatctggatggtatgacggcccaggctctccagacttaccagcaacggctgatgctgctgggagaatttctccagcgcagtacggcagattttgtccgccacgtcgccaatacgctccagctcggcaatggttttactgatcaccataaccagtcgcaggtcgctcgccgtcggctgacgtttggcgataatgcgcacgcaggcttcatcgatcgccacttccatcatgttgacgttcttgtcgccttcgatgacgcgcttcgccagatcgctgtcctggttatgcatcgcggtgattgcatcagaaagctgctgctccaccatgccgcccatggtcatcacctgcgtgcggatactttccagttcggcgttgaactggccggaaatatgtttattaagattgagactgtccataacgcactcctgaatcaaccgtaacgaccggtgatgtagtcttctgtttgtttcttcgctggcttggtgaacagatcgtccgtgttgctgaactcaatcaattcgcccaggtacataaacgccgtgtggtcggaacaacgcgcagcctgctgcatgttgtgggtgacgatcaccacggtgtaatcctgcttcagttcggtgatcagctcttcaatacgcccggtagagatagggtcgagcgcgctacacggttcgtcgagcagcagcacttccgggcgaatggcgataccacgcgcaatacacagacgctgttgctgaccaccagagagagagtaaccgctctggtgcaatttatctttggtttcgttccacaatgcggctttggtcaatgcccactgcacgcgctcgtccatgtcggcacgggagagcttctcaaacagacgaacgccaaaagcgatgttgtcgtagatggacatcggaaacggcgtcggtttctggaacaccatgcccactttcgcacgcagcagtgcgatatcctgagagttggtcaggatgttgtcgccatcaagcagaatttcaccttccgcacgctgctccgggtacagttcaaacattttgttgaaggtacgcagcagcgtgcttttaccgcagccggacggcccgataaacgccgttacctggtttttagcgatatccaggttgatgtttttcagggcatggaatttgccgtagtagaagttcaaattacgaacctgaattttactcggggcagtttcaaccatactcattgcaatcttttcctcatcgtgcctgatgcacttcgctaatcaggcttaccgtaggccggatcaggcgttcacgccgcatccggcaaagtgttaaccgtgtacagagtcaaaaaggcgctcggtcggtcccctcgcccctctggggagagggttagggtgaggggaaaaccgtgtcagcaatatcaaccgtgtttattcttcgcaaaaacaacgcgcgccagaatgttcagcagcagtacgcacagggtaatgatcaataccccggcccaggccaattgctgccattccgcaaacgggctcatcgcaaacttaaagatcgtcaccggcaggttggcgatcggctgcatcatgtccgtgctccagaactggttggagagcgcggtaaacagcagcggcgcggtttcaccagcaatacgggcaatcgccagcaggataccggtcataatcccggacacgctcgctttcagcgtaatcgcagagatcatcttccacttcggtgtacccagcgcataagccgcttcacgcaggctgtacggcaccagtttcagcatgttctcggtggtgcggataacaatcggcacctgcaacaacgccagggcaatcacgcccgcccagccggagaagtgctccatctgcgccaccacaatggtgtaaacaaacagaccaaccacaatgctcggcgcagagagcagaatgtcgttaatgaagcgaatcacttctgccagccaggatttacgaccatattccgccagataaatccccgccataatgcccagcggcgtaccgaataccgtggcccacaaaattaacagcccgctacccgccagagcgttcgccagaccaccaccttccgtattgggcggcggcgtcatttcagtgaacagcgccaggctcataccgtcgataccgcgagtgatggtggacattaaaatccagatcagccagaacaggccgaaggccatcgtcgccatgctgagcgtcagcgcaatacggtttttgaggcggcgacgcgcctgcattttgcggcgagattcagccagcgccgcagtggtttgcatttcaaccatagccattagcgtgccccctcattcttagccaggcgcataatcataaacttgcttgcggcgaggacgatgaaggtaatcacaaacaggatcaggcccagttccatcagtgcggcaacgtgcagaccggattccgcttccgcaaattcgttcgccagcgcagaggtgatactgttgcccggcatatacaggctggcgctgtcgagctggtaggtgttaccgatgataaaggtcaccgccatggtttcaccgagcgcgcggcccagccccagcatgatgccgccgataacaccatttttggtgaacggaagaacgatacgccagataacttcccaggtggtgcagccaataccgtaggcgctctctttcatcatcaccggggtttgttcgaacacatcacgcattaccgccgcaatgtacggaataatcatgatggcgaggatcacgcctgccgcgaggataccgataccaaatgcggggccagagaacagcgcgccaacaatcgggatattgctcatgatattgccgaccggctcctgaaagtaaacggcgaacagcggcgcaaagataaacaggccccacatgccgtaaacgatacttggaatggctgccagcagctcaatggcgatacccagcgggcgtttcagccagccaggcgcaagctcagtcaggaacagggcgataccgaaactcaccgggacggcgatcagcagcgcgataaagctagtcaccaacgtaccgtagatcggcaccagcgccccgtagatatcgttcggtgcatcccactctttggtccataggaaagccagaccaaatttctgaatgctcggccaggaggagatgatcagagagacaataatgccacccaacatcaatagcacaatcagcgccgccagttttaccagcacgctgaaaattatgtcgccctttttacccggtgggttaaaagcaggcttggttgcagccataagttactcttcagttaaacgcgtttacaaagtcattttgtaatgccggatgcggcgtaaaacaccgtacccggcctggagttttattagtacagcggcttaccgctactgtctttaatattggtcttccacgcagcgcgaacctgttcaactacactatccggcaggctggcgtaatccaggtcgttcgcctgtttagccccggttttgtacgcccagtcgaagaatttcagcacttctgtgccttgttctggtttcttctgatctttgtggatcagaatgaacgtggtagaggtaataggccatgcatcttcgcctttctggttggtcagatcctgagcgaaggttttgctccagtctgcaccttttgctgcattagcgaagttttcttcggtcggactaaccggtttaccatcagcggagatcagtttggtgtacgccaggttgttctgcttcgcgtaagcatattcaacataaccaattgcacccggcagacgctgaacgaacgcggcgataccgtcgttacctttaccgcccagaccgatcggccattttacggtagagccagtaccaacgttgtttttccactcttcgttcactttcgccaggtagctggtgaagacgaaggaagtcccggagccatctgcgcggcgtactacagcaatgttttgactaggcagtttcagacccggattcagtttggcgatggcttcatcatcccacttcttgattttgcccaggtagatgtcgccgagggttttaccatccagcaccagttcgccagacttcagccctggaatgttaaccgccagcaccacgccgccaatcacggtcgggaactggaacagaccttcctgagccagtttttcgtcagacagcggcgcgtcagaggcaccaaaatcaacggtattagcgataatctgttttacgccaccggaagaaccgataccctggtagttaactttattaccggtttctttctggtaagtgtcagcccatttggcatacaccggcgcagggaaggttgcacctgcacctgtcaggcttgcttctgcaaacacagagaaagcactcatgcttaaggtcgcggcgacaacagttgcgacggtggtacgcataactttcataatgtctcctgggaggattcataaagcattgtttgttggctacgagaagcaaaataggacaaacaggtgacagttatatgtaaggaatatgacagttttatgacagagagataaagtcttcagtctgatttaaataagcgttgatattcagtcaattacaaacattaataacgaagagatgacagaaaaattttcattctgtgacagagaaaaagtagccgaagatgacggtttgtcacatggagttggcaggatgtttgattaaaaacataacaggaagaaaaatgccccgcttacgcagggcatccatttattactcaaccgtaacgctttttgccaggttacgcggctggtcaacgtcggtgcctttgatcagcgcgacatggtaagccagcagctgcagcggaacggtgtagaagatcggtgcaatcacctcttccacatgcggcatctcgatgatgtgcatgttatcgctacttacaaaacccgcatcctgatcggcgaagacatacaactgaccgccacgcgcgcgaacttcttcaatgttggatttcagtttttccagcaattcgttgttcggtgcaacaacaataaccggcatatcggcatcaattagcgccagcggaccgtgtttcagttcgccagcagcgtaggcttcagcgtgaatgtaagagatctctttcaacttcaatgcgccttccagcgcgattgggtactgatcgccacggcccaggaacagcgcgtgatgtttgtcagagaaatcttctgccagcgcttcaatgcgtttgtcctgagacagcatctgctcaatacggctcggcagcgcctgcagaccatgcacgatgtcatgttcaatggaggcatccagacctttcaggcgagacagcttcgccaccagcatcaacagcacagttaactgagtggtgaatgctttagtggatgccacgccgatttctgtacccgcgttggtcattagcgccagatcggattcgcgcaccagagaagaacccggaacgttacagattgccagactaccaaggtaacccagctctttgctcagacgcaggccagccagggtatccgcggtttcgccagactgactcaaggtgatcatcaggctgttacgacgcacggcagatttgcgatagcggaattcagaggcgatttcgacgtcgcacggaatacctgctaggctttcaaaccagtagcgggaaaccataccggagttataagaagtaccacaggcgaggatctgaatatgctcaaccttgctcagcagttcgtcggcgttcggtcccagctcgcttaaatcaacctgaccgtggctgatgcgtccggtaagggtgtttttgatcgcgttcggctgttcgtagatctctttctgcatgtagtgacggtaaatgcctttatcgcccgcgtcatattgcagattggattcgatatcctgacgttttacttccgcgccagttttatcgaagatgtttacgctacggcgagtgatttccgcaatatcgccctcttcaaggaagataaagcgacgggtcaccggcaacagcgccagctggtcagaagcgataaagttttcgcccatccccaggccaatcaccagcggactaccagaacgtgccgccagcagggtatccgggtgacgggagtccatgatcactgtaccgtacgcaccacgcagctgcgggatagcacgcagaacggcctcacgcagagtcccgccttgtttcagctcccagttcaccagatgggcaatcacttcggtgtcggtttcagaaacgaaggtatagccacgcgcttttagctcttcacgcagcggttcatggttttcgatgatgccgttatgcaccaccacaatgtgttcagaaacatgcggatgcgcattcacttcactaggttcaccgtgggtcgcccagcgagtgtgagcaataccagtgccgccatgcagaggatgttcttccgctgcctgtgccagcatctggactttaccgaggcgacgcaggcgggtcatatgaccttctgcatcaacaacggccagaccggcagagtcatatccgcggtattccagacgacgtaaaccttcaagaaggatttctgctacatcacgttgcgcgatcgcgccaacaattccacacatagtttttgattccgatttatatcgttgtcggtcaacctgtatgcccgttttttcgggcgccccgagccttgtagagagtggggttatttttatagttactgcttgtgggagggagattatgttatctcctcatcccatgtgaccgggttagccggccagaatcactttttctttaccggacgacgccagccttctttctgagtctgcggcacacggctgatagctaatgcattttcgccgacattacgcgtcacagttgtacccgcagcaatggtcgcgcctttgcctactgttaccggggccaccagctgagtgtcggaaccaacaaacacatcgtcgccgataatggtcttaaatttattcgcaccatcgtagttgcaggtaatggttcccgcgccgatgttaacgttatcgccaatttccgcatcgcccaggtaagtcagatgaccagctttgctgcctttacccagacgcgcttttttcatctcaacgaagttaccgacgtgagcaccttccagcaactcagcaccaggacgcaaacgggcaaacgggccaatggtacaggccgctgccagattcgcatcttccacaacggtatacggactgatttcgcaatcatcgccaatcacgctgtttttaatcacgcaaccggtgccaattttcacgcgatgaccgagagtcacgttgccctcgatgataacgttagtatcaatttcaacatcgcgcccgtgagttagcgtaccacgcagatcaaaacgcgctggatcgcgcagcataacgcctgctaacagcagtttttcagcctgttcggactgataaacacgctccagacgggagagttgcaggcggttattcacgccttctacttcgcttaaacgttgcggatgaacggcgacgatttcacgcccttcctgatacgccagcgcaataatgtcggtgatgtagtattcgccctgagcattattgttggtcagcttcgccagccagcgtttcatatctgcgccgttggcaatcagaatgccggtgttgatctcctgaatctgacgctgctcgtcggtggcatctttgtgctcaacaatgccggtaactttgccgttttcacgggtgatacgtccataaccggtcggatcatccagtttcaccgtcagcagaccaatgccaccctgcggtttagcatcacgcagacgctggagtgtttcgacagagatcagcggcacgtcgccgtagagcattaaaatgtcttcatcatcggcaaagaaaggtgcggcctgctgcattgcatgacccgtacccagctgctctgcctgaagcacccagttaaggttgtcgtctttcagcgcctgttttagcagatcgccgccgtgaccgtacaccaggtgaacgtgcgctgcgcctaattcattcgcagcatcaatgacatgctgaaccatcgctttcccggcaagggtatgcagcactttcggaagatcggaatacatgcgcgtgcctttgcctgcggcaaggatcactacgctcatagcattattcaacatacgcgtcctgactgtaatttgagaacgaatttaaaccgcttcaccttgaaaaaactacatttttttcatcgtgaaatggacagaggataaattgttcaataacggattatccccgctgacgaaagcgccattttcgaccatcgtcacgccttttgtctgcagaaaattaaggcagtaccttaatttaagcgtcaggtggatgtttttgctcttatttcgatcaatgaataaacaggaaaacaggggggttttatatcagcaggatctatgtgaacgctattcaggacgggtcacacgcgcaaaaaaaagccagcctgtttccagactggcttttgtgcttttcaagccggtgttacatcgcttttttggtcaactcgataacgcgcagctgcgcgatcgctttggccagttccgcagacgcctgagcgtaatctacgtcgccgtgagagctgctaatgtgctcttcagccttacgtttcgcttccatggctcgcgcttcgtcgagatcctggccgcgaattgcggtgtcggccagaacggtcacgttgccaggctgcacttcaagaatgccgccagacagatagataaactcttcgtgaccgtgctgtttcacgatgcgaatcataccaggcttaatggcggtgagcagcggtgcgtggccagggtagatccccagttcaccttcgctacccgttacctggattttctcgaccagaccagagaacatttgttgctctgcgctgacgacgtccaggtggtaagtcattgccatatcaccctccgattaaggcgttaaagttttttggctttttccacagcttcttcgatggaaccgaccatgtagaacgcctgctccggcaggtgatcgtattcgccttccatgatgcctttaaagccacggatggtgtctttcagggagacgtatttacccggagaaccggtgaatacttctgccacgaagaacggctgggacaggaagcgctggatcttacgagcacgcgctaccaccagtttgtcttcttcagacagttcatccatacccaggatggcgatgatgtctttcagttcctgataacgttgcaggatggactgaacgccacgcgcggtgtcgtagtgttcctgaccaaccaccagcgggtccagctgacggctggtggagtccagcgggtcaacggccgggtagatacccagagacgcgatctgacggctcagtaccacggttgcgtcaaggtgcgcaaaggtggttgccggagacgggtcagtcaagtcatccgcaggtacgtatactgcctgtacggaggtgatagaaccagttttggtggaggtgatacgttcctgcagaacgcccatctcttccgccagggtcggctgataacctaccgcactaggcatacggcccagcagtgcggatacttccgtaccggccagggtgtaacgatagatgttgtcaacgaacagcagaacgtcacgaccttcgtcacggaatttctcagccatggtcagaccggtcagagcaacgcgcagacggtttcccggcggctcgttcatctggccatacaccagggatactttgtcgataacgttggagtcggtcatttcgtggtagaagtcgttaccctcacgagtacgttcacctacgcccgcaaacacagagtaaccggagtgctcgatcgcgatgttacgaatgagctccatcatgtttacggttttacctacacccgcaccaccgaacagaccaactttaccgcccttagcgaacggacacatcaggtcgataactttgataccggtttccagcagttcctgagagttactcagctcttcgtaggaaggtgctgcgcggtgaatcgcccaacgctcttcttcaccgatctcgcctttcatgtcgaccggttcacccagtacgttcatgatacggcccagagtcgctttacctaccgggacttcaatcgggtgttcgaggtcttttacatccagaccgcgacgcagaccgtcggaggaacccattgcgatggtacgtacgataccgccgccgagctgctgctgaacttccagcaccagacgctcattaccattttgcacctcaagagcatcgtacacgcgcggtacggcatcctgagggaattcgacgtcaactacggcgccgattacctggacaatctttccagtagccatcttaaatcctctacgaaataacctgtttaaaccgcggcggccccgctgacgatctcggtgagttcctgagtaatgctggcctgacgagctttgttgtataccaactgcagctctttaatcaggctgccgccattgtcggtcgcggctttcatcgccaccatacgggcggcctgctcgctggccaggttttcaaccacgccctgataaacctgagattcgacataacgacgcagcagggtatccagcaacgccttcggatcgggttcgtacaggtaatcccaggatttatgtttcagatcatcatcatcacttgccggtaacggcagcagctggctgatggtcggaacctgagacatggtgttaataaatttgttgctgacaatgtaaagcttgtccagacggccttcgtcgtaggcctgcaacatcacttttaccggaccgatcagttcggacagggaagggttatcccccatgccggtgacctgggcaacaacattgccgcccacggagttgaagaagctcacgcctttgctgccgatcattgcgaggtcgcattgaacgcctttgtcggtccaggtcttcatttccgccagcagttttttgaacaggttaatgttcaaaccaccgcacaaaccacggtcggtgctcaccaccaggtagcccacgcgtttaacgtcgcggtcttccaggtaagggtgcttatattccagattaccgtgtgcaaggtgaccaatcactttgcgcatggtttctgcataaggacggctggccgccatgcgatcctggcttttacgcattttggaagcggcgaccatctccatcgctttagtgatcttttgcgtgttctggacgcttgcgatcttactacgtatctcttttgcgccggccatgagcttctcctcaatgccttgcggcctgccctaaggcaagccgccagacgttaccaggattgggttgctttgaaggaatcgaggatgcctttcagcttgccttcgatttcgtcgttgtagccaccggtctggttgatctcttgcatcaacggagcgtgatcacggtcgacgtaagccagcagagcggcttcgaagctgccaattttgctcagttcaacatccgccaggtaaccacgttctgctgcgaacagaaccagagactgctgcgcaacggacatcggcgcatactgtttctgtttcagcagttcggtcactttctgaccgtggtcaagctgcttacgtgttgcatcgtcaaggtcggatgcaaactgagagaacgctgccagttcacgatactgtgccagagcggtacggataccaccggacagttttttcatgatcttggtctgtgctgcaccaccaacacgggatacggaaatacccgggttaaccgcaggacgaataccggcgttgaacaggttggtttccaggaagatctgaccatcggtaatggagattacgttggtcggaacgaacgcagaaacgtcacccgcctgagtttcgataatcggcagtgcggtcagagaaccggttttccctttcacttcacctttggtgaaggcttcaacgtattcggcgttaacacgtgcagcacgctccagcagacgagagtggaggtagaaaacgtcgcccgggaatgcttcacgtcctggcggacgacggagcagcagggagatctgacggtaagcaacagcctgtttagacaggtcatcgtaaatgatcagcgcatcttcaccgcggtcacggaagtattcgcccattgcgcaaccggcatacggtgccaggtattgcagtgcagcggattcagacgcggttgctaccacaacgatggtgttagccagtgcgccgtgctcttccagtttacgtaccacgttagaaatggtggacgctttctggccgatagcgacatagatacatttgataccggaatcgcgctggttgatgatggcatcgatagccagtgcggttttacctgtctgacggtcaccgatgatcaattcacgctgaccacgaccgattgggatcatggagtcaacggctttataaccggtctgtaccggctgatctacggactgacgttcgataacgcccggagcgattgcttctacagcagagaagccgtcgtgatccagcggacctttaccgtcgattggtgcacccagagtgttaaccacacggcccagcaggccacggccaaccggaacttccaggatacggccagtacacttaactttcatgccttcggcaaggtcagcgtacggacccataacaaccgcacctacagagtcgcgctcgaggttcagtgcgatagcgtaacggttacccggcagggagatcatttcaccctgcatacaatcggccaggccgtgaatgcggataacaccgtcacttacagaaacaatagtaccttcgttgtgagcttcactcacaacattgaactgagcaatgcgctgcttgatcagttcgctgatttcggtggaattcagttgcatgctccagtccccttaagactgcaagacgtctgcaaggcgctcaagacgaccgcgtacgctgccatcaatgaccatatcacccgctcggatgataacgcctgccattacagacttatcgattttgcaattcagcttaactttgcgactcagacgtttttccatcgcagcagaaattttcgcgagctgttgttcactcagtgcggcagcggaaatgacgtctacctcagcggtagcctcactcacggcacgcaggtgaataaactgctccagaacatccgggagcgcgttaagacgaccattttcagccataacccgaatcaggttctgaccgttttcgtccagttgctcaccacaaactgcgataaagctctcggcgagcgtttctggcgcaagcgcgccagagagaagctctgccatttgttcgtttttggttacctcggcggcaaacgccagcatgtcctgccagcgttctacactttggtgttcgacggcaaagtcaaaagctgctttggcgtaggggcgagctaccgtaataaattcagacatcagcccctccctccttacagttcagcgacaagtttatccacgatgtcgctgttagcagcttcatccacggaacgttcgatgatcttctcggcgccagcaacagccaggatagcaacttgcttacgcagctcttcacgggcacgtttacgctcggcttcaatttccgcctgcgcctgggccacgattttagtacgttcctgttctgcctcagctttcgcttcgtccagaatctggctgcggcgtttgttcgcctgctcgatgattacctgggcttccgctttcgcttttttcagctggtcggtcgcgctggcctttgcaaggtcaaggtccttatgtgctcgttctgcggaagcaaggccgtcagcaatttctttttgacgtttttcgatggctgccattaatggcggccatacgtacttcatgcagaacagaacgaacaggacaaacgcgatggcctggccgaggattgttgcgttaagattcacagcacaatgcctctatttagttaacgttctgatattgctctttaaataaaagcaacgcttattacgcgacagcgaacatcacgtacagacccagacctacagcgatcatcgggatagcatccaccagacccataacgataaagaactgagtacgcagcagaggaatcagatcaggttgacgcgctgcgccttccaggaatttacccccgaggatgccgataccgatcgcagcaccgattgccgccagacccatcatcacagcggcagccatgtacagcagatccatattcaggttttccatgacagtctccagtttgtttcagttaaaacgtagtagtgttggtaaattaatgttcttcagacgccatgctcagatagacgatcgtcagaaccatgaagatgaaggcttgcagcgtaatgatcaggatgtggaaaatggcccacggcacattcaggatccactgactccaccacggcaacagaccagcaatcagaatgaaaatcagctcaccggcatacatgttaccgaacagtcgcaaaccgagactaactggtttggacagcaggcttaccccttcaaggattaagttgacaggaatgaacgcccagtgattgaacggctgcagcgtcaactctttcgtgaagccgccgatgcctttcattttgatgctgtagaacagaatcaggataaatacgcccagtgccatagacagcgttacgttcacgtccgcagacggaaccacacgcagtgcaggcagacccagtacatgttcagcaatgtacggcagcaggtcgataggcagtaaatccatcaggttcatcaggaatacccagacgaagatcgtcagggccagcggagcaatcagcttgcttttgccatggtacatgtctttcacgctaccattaacaaagccgatcaccagctcaatcgcggtctgaaacttacctggcacaccgctggtcgcctttttggctacgctacggaataaaaccaggaacaacagacccagcaccacgctgaagaacatggagtcaatattgattgtccagaaggtggctggggggttttgtggatccaccaggctgaatgtacgcaggtccagctgaaggttattcaggtggtgtcctatgtaatcctgcggcgtcatattttcactagccatgatgccttttaccctttgttgttaattacagccggtgccagtatctgaaccaccagcaccaaaacccacgtaacgatcagcggcaagaataccgcctttaaaaccgccaacgccaccaccagtaacaccaacatcgccagaactttgaaagcttcgccaaatgcgaatgtccaggccacccggcctttcgctggtgtatgcgcctggtgacgccaggcaaatatcataaacaaaacgttaggcagaaagactgccaggcccccgcttattgcagagacgccccagaaggggtctttgaggctgaacagcaatccacttgctatcaccaccagtaactgaacgagcagaagcttccgagcaacgtttcgactcacgaggctcacagacatcacgtttttcactcctgctcccttcgaggtatgccgcgtgtcgtataaaactttctttaaggcttagagtcaagcatcaaaaagcggtcaaattatacggtgcgcccccgtgatttcaaacaataagtagccaaaaggtgaataaatgtttaaatatttttccagtgcatacaattgcgacttttctgctaaccctgttcgatcatgaaaaactgtaaataacgcgtaaacactggtgataaagcgtgcttcagatcacatattgcgcatgttcgcgcacagcatatttatttacttggcaaatgatgcctttgcaagtttatgatatttcagtctaaaaacagatactgttttaataaatgacatttacacaacaaaaaccacccattgacatttttaataatgttttaacagccaatgatggttcttagcgccgatttttagcagactgatattttcactaatgacttattttctgcttaccaaaaaaagccacgttatcttgttgatgcaaaagagtgaacgtggcgttaaatgtaaccagttatatcagtagaaaacctggttgttgttaacagtctaaccggtcaattttttatgatttttttgataaaaattaaattttatttgctttaatcaccaccagatgacgttcgccatccagggctggaacctgaagtttaaccacactttcgacctgatattcttcgggcaacaaagcgatttcatcttccggcatttgccctttcagcgcgtagaaacggccttgctcaccaggaagatggtggcaccagctcaccatatcgttcagagaggcaaaagcgcggctaattacgccatcaaatggcggctcactaggaaactcttctaccctgctctgtactggttcaatattctccagtttaagctcatgttgcacctgacgaaggaaacgcacgcgtttaccaaggctatccaacagagtgaaatgggcttcaggacgcacgatagagagtggaatgcctggcagtcctggtccggtgccgacatcgataaaccgttcaccttgcagatacggtgccaccacaatgctatcgagaatatggcgtaccagcatctcattaggatcgcggacgctagtcaggttgtacgctttgttccatttatgcagcatattcacgtaggcaataagctggtttttctggtgatcggtaaggctaatacctgcgtctttcagcagtaaggagagtttgttgagcacggtgattacctgttcttgatgcgttgcctggtaagcgggtgcttaccaggcatttttaatgcgttatgcgctacgacgcagcataccctgttttttcagccacaccagcagaatggagatggccgcaggcgtgacgccagaaatacggctagcttggccgatagaggctggtttgtgatcgttaagtttggcgatcacttcgttagaaagaccggatacctggcggtaatccagtgtcgcgggtagcagggtgttctcgttacgcagctgcttttcgatctcatcttgctggcgcgcgatataaccttcgtatttaacctgaatctcaacctgttccgccgcctgttcgtctgtcaacgcaggggcaaacggcgtcagcgtggttaatttttcataagtcatttccggacgacgcagcagatcttcaccactggcttcacgggaaagcggcgcagtcaggtgagcattcacttcggctgcagcttccgcgctcggggttacccaggtgcttttcagacgctgacgctcacgctcgatattctcaagtttctcgttaaagcgcgcccaacgttcgtcatccaccaggcccagttcacgaccgatttcagtcaaacgcagatccgcattatcttcgcgtagcatcagacgatattctgcgcggctagtaaacatacgatacggttctttggttcctaaagtgcacaggtcatcaactagtacgccgagatacgcctgagaacgtgccggagcccaaccttctttgtcagcagacagacgggcagcgttaagaccggccagcaaaccttgcgcagcggcttcttcgtaaccggtagtgccgttaatctgaccagcaaagaacagcccctggataaacttgctctccagcgtcggtttcaggtcgcgaggatcgaagaagtcatactcaatggcataacccggacgcacgatcttcgcgttttccatcccctgcatagagcggacgatttgcatctgcacatcgaacggcaggctggtggagataccgttcggataaatttcattagaggtcagtccttccggttcaaggaagatctgatgctgatttctgtcggcgaagcgcatgactttgtcttcgatgctcgggcagtagcgtgggccgacaccttcgatcacccctgcgtacattgggctacgatcgaggttactgcggatcacatcatgggttttctcgttggtatgagtgatataacacggcacctgctggggatgctgggacgcattgcccataaagctgaataccggcattgggttatcgccatgctgttgcgccagtacgctaaagtcgatggttcgagcatcaatacgcggtggtgtcccggttttcagacgaccaacgcgcagcggcagttcacgcaaacggcgagaaagcggaatggacggcggatcaccagcacggccaccgctgtaattatccagaccgatatgaattttaccgtcgaggaacgtcccaacggtgagcacgacggctttggcacggaacttcagtcccatttgggtaacagcaccgaccacgcgatcgttttcgacaataagatcttcaaccgcctgctggaagatcatcaggttcggttggttctccagcgccgtacgtaccgcctgacggtagagcacacgatccgcctgagctcgggtagcgcgaaccgccggtcctttgcttgcgtttagtatcctaaactggatacccgcctgatcgatcgctttcgccatcagaccgccgagtgcatccacttcttttaccagatgtcccttcccaataccgccgatcgccgggttgcagctcatctgccccagagtgtcgatattgtgtgtcaaaagcagagtctgttgacccatacgcgccgcggccatcgcggcctcggtgcctgcatgacccccgccaatgatgatgacgtcaaaaggatccggataaaacatggtgattgcctcgcataacgcggtatgaaaatggattgaagcccgggccgtggattctactcaactttgtcggcttgagaaagacctgggatcctgggtattaaaaagaagatctatttatttagagatctgttctattgtgatctcttattaggatcgcactgccctgtggataacaaggatccggcttttaagatcaacaacctggaaaggatcattaactgtgaatgatcggtgatcctggaccgtataagctgggatcagaatgaggggttatacacaactcaaaaactgaacaacagttgttctttggataactaccggttgatccaagcttcctgacagagttatccacagtagatcgcacgatctgtatacttatttgagtaaattaacccagcttcccagccattcttctgccggatcttccggaatgtcgtgatcaagaatgttgatcttcagtgtttcgcctgtctgttttgcaccggaatttttgagttctgcctcgagtttatcgatagccccacaaaaggtgtcatattcacgactgccaataccgattgcgccaaagcggactgcagaaagatcgggcttctgttcctgcaatgcttcatagaaaggagaaaggttgtccggaatatctccggcaccgtgggtggagctgataaccagccagatcccactggcaggtaaatcttctaacagcggaccgtgcagcgtttcggtggtaaaacccgcctcttccagcttttcagccaggtgttctgctacatattcggcaccgccgagggtgctgccgctgataagagtgatatctgccataaaccgccacctttattaagagtggcgtattgtacgctgtgaacgcgttgggatctacctgtggaaaagtatgggattaaaaaagccgatcagggcttgatggtacgcatgatcgggttttgcaggacgatcaatgtctcggtggactgaatttcatcaattgtttggatcttgttgataagtacatgctggagagcgtcgatgctacggcacatcacttttataaagatgctgtagtggccggttgtgtaataggcttcagtgacttcatcaaggctttccagctttgccagcgcggaagggtagtctttggcgctctttaatataatgccgataaagcagcctacgtcataaccgagctgcttcgggctgacatcaatacgcgccccggtaatgatccccgcctgcttcattttctctactcgaacgtgaatcgtccccggactgacgccaaattgtttcgccagttcggcgtaagcggtgcgcgcattgcccattaatgcttccaggatgccacggtccagattgtcgatcagataattttccataggattttcttatgcggattgatgattcattctattttagccttcttttttaatgaatcaaaagtgagttaggctttttattgaatgattattgcatgtgtgtcggtttttgttgcttaatcataagcaacaggacgcaggagtataaaaaatgaaaaccgcttacattgccaaacaacgtcaaattagcttcgtgaaatctcacttttctcgtcaactggaagaacgtctggggctgatcgaagtccaggcgccgattcttagccgtgtgggggatggcacgcaggataacttgagcggctgtgaaaaagcggtgcaggtaaaagtgaaagctctgcctgatgcccagttcgaagtggttcatagtctggcgaagtggaaacgtcagaccttagggcaacacgacttcagcgcgggcgaagggctgtacacgcacatgaaagcccttcgccccgatgaagaccgtctttctccgttgcacagcgtctatgttgaccagtgggactgggaacgcgtaatgggcgacggtgagcgtcaattcagcactctgaaaagcacggtagaggcgatctgggcgggaattaaagcaaccgaagctgcggttagcgaagagtttggcctggcaccgttcctgccggatcagatccacttcgtacacagccaggagttactgtctcgttatccggatcttgatgccaaagggcgtgagcgggcgatagcgaaagatcttggcgcggtattccttgtcgggattggcggcaagctgagcgatggtcatcgccacgacgtgcgcgcaccggattatgatgactggagcaccccgagtgagctgggccatgcgggtctgaacggcgatattctggtgtggaacccggtactggaagatgcgtttgagctttcctccatggggatccgtgtagatgccgacacgctgaagcatcaactggcgctgaccggtgacgaagatcgcctggagctggagtggcatcaggcgctgctgcgcggtgaaatgccgcagaccatcggcggcggtatcggccagtctcgtttgactatgctgctgctgcaactgccgcatatcggccaggttcagtgtggagtatggccagctgctgttcgcgagagcgtcccttctctgctgtaataatttatcgccgccagcgtctgagcaggcggcttcgcatcccggtatcaaagcgccagatatgatcgaaaatgcgcatgatgccgggtttgccgtgtgcgctcatcgccacggcatgaaagcgatgctgatgtacccgctgcagctctttcactttactcgtcacgtcgtcaggcaaccgctgagcgataaaatcagaaatcaccaccgcatcggcatcaaaccattccctgctttgcaagcgttccataatggcgcgaaaacaactggcaagatcggtgccgccacgaaactgctggcttaaaaaacggattgcttgttcgatgccttgtgggccactaagctcataacggacgatctcggtggaaaatagcataatatagcagcgccggttttctgcgagagcaatgcgcatcaaggccaggcagaacgctttcgcacactgttcattaaagccgcccatactgccggaagtatccacacagacaataaacggcccgcgcggctgttcatcgtaatctttatgtaccaccggacgttcgatcactttttcacgccagctctcaccgtgcaggcgataggtgagcaactgtttttccaccagccgacggtaaaactcatactccagttccgttatccctagtgtcgccagttctggcggcaggagacgtaaaatatcatcgctttgttgcagaccatcaacctgctcaggaaccgtcgccggttcgcgcaccatggtgcggaaggtttccatctgcgcatcgttgcgcggtatacttttggcttcccgagaacgccccagctgctctgccaggcgtttcagttccggctgttcgttaagaaattcaccgtatttcacaatcaactgatagtcgccacgtttaagctgaccggcgctcatatcccacagacgaccagctgcagtattgttatctgcgagaatcggttcaagttgtccgctcagcgtcatgcgttcctgaacttcactcaacagttgttcgcgttcttcttctaatagctgttgatttaacgtcgttgcttgcacgatcagacttaaacgccaacgctggagaaaaagcgtgtgtaacgcactagtgatcgtgctgttagcatcaaccaactgtcgggcttgttctgcccatggagaattcagacgatgcagtaagtccaggatctgtggtagctgcacaataaactgtggcgtggagaggagctggctttgctgatagcacatcacctcttcggtgagttccggcgggactcgggcatctttcagccgactgcgcagcgcttcacgccagcggggaacatcatcagtgattgccgccttcaggcgtgggaatttttcaaagaagaccgccagctgcggactggccagcagtgcgatgatcatctcttcgatcaatccctcttcgctgacggccagcatcacattaagcgtatccagcgttagcattgttgtgcctggcgaatctgtgcaccgacatcctgtaggctggcttcaatgcgacctaaccagtcgccagggataaacagacatttttgctgttcgctgaataaagcgtgttgcttgcgccagtcgctttcaagctcttccagttgttgttttatttcaccaggcagaccttcagcgctactaccgggaagtgccagcgtactgccttgtaaacttacatcgcgaacgacaagatgttgggcgctatcaacttccagattcagtttctgggcaaagccgataccgttcagtttaccgcgaatttcaccacctttgctcagccactgttccagcgcgctacgctcaaaggagatatgaaccacttccatatcatgcagttttaacggtttttgcagcagtagagtcagagtggaagcagtaacgttaacaggaagttgatactgctgacgacggctgaaaatgccgcccagacgaattaccgttaaggctgttttatcgctttgttgctgctggagttgcaggtgacgttgcacaatcgcgccaaggcgagtcaacatcccttgctgttgccaggcgtgaccggtcatcaatacatcaatttgttgttgtatcaaattcaggctttgcgcgtcataccacaggcaatctttcagcaaaatgagatctaccggggcaacagcactgcgaccgctaaaaaaggcgctggcctgcaataatcggatcgcttttttccagcgacgatcgctgacataaggcgcatccggtaatttatccagttgctggcgcagcataaaaatcagctcaaatacatgatcgggcagcgtaatttcaccaatctctttctgccagcgttcatattcttcatctgtgacctgcaaggcatcaggaaccggattgtcgttttcatcctgttgactggtcagcatggagcggaaattcgctttatcctgcactttatctaaccacagacgaatcagcatgcggtcatataacgcttccagactgctgtctgcttccggcagctcgttggaggccgccaccagcagacgcatcgggattttttctacgtgtgcaccgttgcggaactggcgctcgttaatggcggtgagcaaggtattaagaattgccgggcccgctttccagatctcatccagaaagacaatttctgcttccggcaggtaaccgctggttaaacgttcatagcgcccttcatcttttagcgcctgaatagaaaggggaccaaaaacttcttccggcgtggagaagcgggtcatcagatattcaaacgcgcgggcattctgaaaggcgaattttaagcgccgggcgatcaaacttttggcaatacctggcgggccaaggaggaacacactttcaccacttaatgccgctaataaacacaagcggatggcgtggctacgttcataaagccccttttccaagctactgctcaggcgggaaattctttccgctaataaatgagggtgagccataatgaagtggcgtcctttcgtcaaaagttctgcgtaaattgcgagtatagacgtttcttgctggtggctaaaatagtctcaaagggggggtatttttctttgagccaggttaatgtggccgcatttaggagtacgattttgccgttaatcgtgcatactgtgcgcttttttgtgggccaagggactaagcacacatttcatatttcaacgaaagactagtctatgagcactgataataagcaaagtttgcccgcgattaccctcgcggcgattggagttgtctacggcgatattggtaccagcccgttatatacacttcgtgaatgtttgtccggccagtttggttttggcgttgaacgcgatgccgtgtttggctttttaagcctgatcttctggctgctaatctttgtggtttccattaaatatctcaccttcgtgatgcgggcagataacgccggtgagggggggatcctgacgttgatgagccttgccgggcgtaatacgagcgcgcgaaccacaagtatgctggtgattatggggctaatcggcggcagctttttttatggtgaagtcgtcataacacccgctattagcgtgatgagtgccattgaaggtctggaaatcgtcgccccgcagctggatacctggatagttcccctcagtattatcgttctcactttattatttatgattcaaaaacatggcacggctatggtcggtaagctgtttgcgccgatcatgctgacctggtttttgattctggcaggactggggttacgtagcattattgctaacccggaagtgctgcatgcgctgaatccaatgtgggcggtgcatttcttccttgaatacaaaacggtttcttttattgcattaggggcagtggtgttgagcattacgggggtcgaggcgctgtatgctgatatggggcactttggtaagttccctattcgcctggcgtggttcaccgtcgtattaccttccttgacccttaattacttcggtcagggagcgctgttgttaaagaacccggaagcgattaagaacccgttcttcctgttggcaccggactgggcgctgatcccgctgctgatcatcgccgcactggcgacggtaattgccagccaggcggttatctctggcgtcttcagtttgacgcgtcaggcggtacgtctgggatatttgagcccgatgcgcattattcacacctccgaaatggagagtgggcaaatctatattccgtttgtgaactggatgctctatgtcgcggtcgtgattgtgattgtcagctttgagcactccagcaacctggcggcggcgtacgggattgcggtgaccggaaccatggtgctgacgtctattctcagcactaccgtggcacgtcagaactggcactggaataagtattttgttgcgctgatcctgattgctttcctttgtgtcgatattccattgttcaccgctaacctcgataaactgctctccggcggctggttgccattgagcctcggtactgtgatgtttatcgtgatgaccacctggaagagcgagcgtttccgcttgctgcggcggatgcatgaacatggtaactctctggaagcgatgattgctagcctggagaaaagtccgcctgttcgcgtgcccgggaccgcggtgtatatgagccgtgcaatcaacgtcattccctttgcgctgatgcataaccttaaacataacaaggtattgcatgagcgggtgattctgttaactctgcgcaccgaagacgctccatatgtccataacgtccgtcgggtacagattgaacaactgagccccactttctggcgcgtggtggcaagttatggttggcgagaaacgccaaacgtagaagaagttttccaccgctgcggtctggaaggattaagttgccggatgatggaaacctccttctttatgagccatgagagcttgatcctcggcaaacgcccgtggtatttgcgtctgcgcggcaagctgtacttgctgctgcaacgtaatgcgctgcgtgcaccagatcaatttgaaatcccgccaaacagggttatcgaactgggtactcaggtcgaaatctaacgccagacgcctcctttcttcataagggggcgtttttgttttcatggttaatcaccatgtaaaacgtttcgaggttgatcacatttccgtaacgtcacgatggttttcccaactcagtcaggattaaactgtgggtcagcgaaacgtttcgctgatggagaaaaaaatgaaaaaaggcaccgttcttaattctgatattagtagcgtgatctcccgtctgggacataccgatacgctggtggtgtgtgatgctggtttacccatccccaaaagtacaacgcgtatcgatatggcattaacccagggtgtaccttcttttatgcaggtgctgggcgtcgtcacaaatgaaatgcaggtcgaggcggccattatcgcggaagagatcaaacaccataatccgcaactccacgaaacgttgctcactcaccttgagcagctgcaaaaacaccagggaaataccattgaaattcgttacaccacgcatgaacaattcaaacaacaaaccgcagaaagtcaggcggtaattcgcagcggagaatgttctccgtatgcgaatatcattctctgtgctggcgtgacgttctgaggccgtcatggaagcattacttcagcttaaaggcatcgataaagccttcccgggcgtaaaagccctcagcggcgcagcgttaaatgtctatccgggccgcgtgatggcgctggtgggcgaaaacggcgcgggtaaatccaccatgatgaaagtgcttactggcatctatactcgcgatgccggtacgcttttatggctggggaaagaaacgacatttaccgggccaaaatcttcccaggaagccgggattgggattatccatcaggaactgaacctgatcccgcagttgaccattgccgaaaacattttcctcggtcgtgagtttgttaatcgctttggcaaaattgactggaaaaccatgtatgccgaagcggataaattgctggctaaacttaacctgcgctttaaaagcgacaagctggtgggcgatctttccatcggtgaccagcaaatggttgaaatcgccaaagtgctgagctttgagagcaaagtcatcattatggatgaaccgaccgatgcgctgaccgataccgaaaccgaatccctgttccgcgtcatccgcgagctgaaaagccaaggccgcggtattgtctatatctcccaccgcatgaaagaaatcttcgagatttgcgatgacgttaccgtttttcgtgatgggcaatttattgctgagcgcgaagtggcaagtctgaccgaagatagcctgattgagatgatggtgggtcgcaagctggaagatcaatatccgcacctggacaaagcgccgggagatatccgcctgaaagtcgataatctctgcggacctggcgttaacgatgtctcttttactttacgcaaaggcgaaattcttggcgtctctggtttgatgggcgcaggtcgtaccgaactgatgaaagtgctctacggcgcactaccgcgcaccagcggttacgtcaccctggatgggcatgaagtcgttacccgtagtccgcaggatggcctggcaaacggcattgtgtatatctccgaagaccgtaaacgtgacggtttagtgttgggcatgagtgtaaaagagaacatgagcctgacagcgctgcgctacttcagccgcgctggcggcagtttgaagcatgccgatgaacagcaggctgtgagtgatttcattcgtctgtttaatgtgaaaactccgagcatggaacaggcaattggtctgctttccggtggcaatcagcaaaaagtggcgattgcccgcggtctgatgacacgccccaaagtgttgatccttgatgaacctacccgtggcgtagatgtcggcgcgaaaaaagagatctatcaactgattaaccagttcaaagccgatggcttgagcatcattctggtgagtagcgagatgccagaagtattaggcatgagcgatcgcatcatcgtcatgcatgaagggcatctcagcggggaatttactcgtgagcaggccacccaggaagtgttaatggctgccgctgtgggcaagcttaatcgcgtgaatcaggagtaaaaaaatgacaacccagactgtctctggtcgccgttatttcacgaaagcgtggctgatggagcagaaaagccttatcgctctgctggtgctgatcgcgattgtcagcacgttaagcccgaactttttcaccatcaataacttattcaatattctccagcaaaccagtgtgaacgccattatggcggtcgggatgacgctggtgatcctgacgagcggcatcgacttaagcgtaggttctctgttggcgctgaccggcgcagttgctgcatctatcgtcggcattgaagtcaatgcgctggtggctgtcgctgctgctctcgcgttaggtgccgcaattggtgcggtaaccggggtgattgtagcgaaaggtcgcgtccaggcgtttatcgctacgctggttatgatgcttttactgcgcggcgtgaccatggtttataccaacggtagcccagtgaataccggctttactgagaacgccgatctgtttggctggtttggtattggtcgtccgctgggcgtaccgacgccagtctggatcatggggattgtcttcctcgcggcctggtacatgctgcatcacacgcgtctggggcgttacatctacgcgctgggcggcaacgaagcggcaacgcgtctttctggtatcaacgtcaataaaatcaaaatcatcgtctattctctttgtggtctgctggcaagcctggccgggatcattgaagtggcgcgtctctcctccgcacaacccacggcggggactggctatgagctggatgctattgctgcggtggttctgggcggtacgagtctggcgggcggaaaaggtcgcattgttgggacgttgatcggcgcattaattcttggcttccttaataatggattgaatttgttaggtgtttcctcctattaccagatgatcgtcaaagcggtggtgattttgctggcggtgctggtagacaacaaaaagcagtaataacgactacaggacatcttgaatatgaacatgaaaaaactggctaccctggtttccgctgttgcgctaagcgccaccgtcagtgcgaatgcgatggcaaaagacaccatcgcgctggtggtctccacgcttaacaacccgttctttgtaagcctgaaagatggcgcgcagaaagaggcggataaacttggctataacctggtggtgctggactcccagaacaacccggcgaaagagctggcgaacgtgcaggacttaaccgttcgcggcacaaaaattctgctgattaacccgaccgactccgacgcagtgggtaatgctgtgaagatggctaaccaggcgaacatcccggttatcactcttgaccgccaggcaacgaaaggtgaagtggtgagccacattgcttctgataacgtactgggcggcaaaatcgctggtgattacatcgcgaagaaagcgggtgaaggtgccaaagttatcgagctgcaaggcattgctggtacatccgcagcccgtgaacgtggcgaaggcttccagcaggccgttgctgctcacaagtttaatgttcttgccagccagccagcagattttgatcgcattaaaggtttgaacgtaatgcagaacctgttgaccgctcatccggatgttcaggctgtattcgcgcagaatgatgaaatggcgctgggcgcgctgcgcgcactgcaaactgccggtaaaagcgatgtgatggtcgtcggatttgacggtacaccggatggcgaaaaagcggtgaatgatggcaaactagcagcgactatcgctcagctacccgatcagattggcgcgaaaggcgtcgaaaccgcagataaagtgctgaaaggcgagaaagttcaggctaagtatccggttgatctgaaactggttgttaagcagtaattttaatcaggttgtatgacctgatggtgacataaatacgtcatcgacagatgaacgtgtaatataaagaaaagcagggcacgcgccaccctaacacggtggcgcattttatggacatcccgaatatgcaaaacgcaggcagcctcgttgttcttggcagcattaatgctgaccacattcttaatcttcaatcttttcctactccaggcgaaaccgtaaccggtaaccactatcaggttgcatttggcggcaaaggcgcgaatcaggctgtggctgctgggcgtagcggtgcgaatatcgcgtttattgcctgtacgggtgatgacagcattggtgagagcgttcgccagcagctcgccactgataacattgatattactccggtcagcgtgatcaaaggcgaaagtacaggtgtggcgctgatttttgttaatggcgaaggtgagaatgtcatcggtattcatgccggcgctaatgctgccctttccccggcgctggtggaagcgcaacgtgagcgtattgccaacgcgagtgcattattaatgcagctggaaagtccactcgaaagtgtgatggcagcggcgaaaatcgcccatcaaaataagactatcgttgcgcttaacccggctccggctcgcgaacttcctgacgaactgctggcgctggtggacattattacgccaaacgaaacggaagcagaaaagctcaccggtattcgtgttgaaaatgatgaagatgcagcgaaggcggcgcaggtactgcatgaaaaaggtatccgtactgtactgattactttaggaagtcgtggtgtatgggctagcgtgaatggtgaaggtcagcgcgttcctggattccgggtgcaggctgtcgataccattgctgccggagatacctttaacggtgcgttaatcacggcattgctggaagaaaaaccattgccagaggcgattcgttttgcccatgctgccgctgcgattgccgtaacacgtaaaggcgcacaaccttccgtaccgtggcgtgaagagatcgacgcatttttagacaggcagaggtgacgcttggctacaatgaaagatgttgcccgcctggcgggcgtttctaccagtacagtttctcacgttatcaataaagatcgcttcgtcagtgaagcgattaccgccaaagttgaagcggcgattaaagaactcaattacgcgccaagtgctctggcgcgtagcctcaaactcaatcaaacacataccattggcatgttgatcactgccagtaccaatcctttctatagtgaactggtgcgtggcgttgaacgcagctgcttcgaacgcggttatagtctcgtcctttgcaataccgaaggcgatgaacagcggatgaatcgcaatctggaaacgctgatgcaaaaacgcgttgatggcttgctgttactgtgcaccgaaacgcatcaacctagccgtgaaatcatgcaacgttatccgacagtgcctactgtgatgatggactgggctccgttcgatggcgacagcgatcttattcaggataacagcttgctgggcggagacttagcaacgcaatatctgatcgataaaggtcatacccgtatcgcctgtattaccggcccgctggataaaactccggcgcgcctgcggttggaaggttatcgggcggcgatgaaacgtgcgggtctcaacattcctgatggctatgaagtcactggtgattttgaatttaacggcgggtttgacgctatgcgccaactgctaagtcatccgctgcgtcctcaggccgtctttaccggaaatgacgctatggctgttggcgtttaccaggcgttatatcaggcagagttacaggttccgcaggatatcgcggtgattggctatgacgatatcgaactggcaagctttatgacgccaccattaaccactatccaccaaccgaaagatgaactgggggagctggcgattgatgtactcatccatcggataacccagccgacccttcagcaacaacgattacaacttactccgattctgatggaacgcggtagcgcttaattactcgctttcacttggaacgcggttcggcttagatttacgctgtcttttgatcaaattattaccatcggttgttttcagaagcatgaacattgctgcactagcaacagtaataatgcccattgtgataaacgtatagtggaattgttcgacagtcgttgtgccttccattccttcataaacgcgaaggacggccgcacttacagcaacgcctaaactaatgctcagttgctgcgtgaccgccagaacactgttaccgctgctggcattgtcatcggtcagatcggcaagtgtgatggtattcatcgcggtaaactgcgtgctcatagccatccctaatataaacaacggcaagatcagcatccatatagccattgctggactttgcaaagagaactgagcgatcattagcccaataatcaccgtgatccccactaacgtatggcgatagcccagacgacgtaagacttgggtaaccatgctttttgcaataatggaacctaacgctgtcggtgccatcatacagccagcaataaacgcctgataaccaaatcctacctgtaacatcaatggcataaggaacggtacacagccggtccccagacgggttgcaatattgcctacgataccgatgctgaaagtgcgggttttaaataaatctaaactaattaatgggtttggcgtgcgtcgtgcatggagaatatagagaagcagtaacccgatgctggtgacaattaccgtcaaggcaatccagctggcgacaatcttttccccgaatagctctattccgctactgaagagaacaaggctgaggccaaacagcaaaaagccagtgatatcgaatctgcgtcgtgcggtggtgaaattgggcatatgtttgcgcgcgtaaagaaggcccgcaatacctatggggatattgattaaaaatatccagtgccaggttgcccaggtgaccagcacgccgccaagaacggggcctaaaattggccccaccagacccggcatggcgacaaaattcaatactggaagaagttcattacgaggataagcgcgcagtaaggccagccgagcaacaggcatcatcattgcgccgcctatcccctgaataacccggaagacaaccagctgtggtaggctattagaaagtgcgcaggccagagaacccaatgtgaacagactcacggcaagggtaaaaatgcgacgcgtaccgaagcgatcggctagccatccgcttaccggaataagcatcgccaccgtcagcgtataactgatgatggcactttgcatcgcgagaggagaacgattaaggctatgagcgattgcgggtaaggcggtattaagaatagtggcatcaagtgcctgcatgaagaaggccatcgccgcgatccacggcaaacccgccatactgcgcttctttttatcgctcattcaatgtcctgttatcgggttatcacttatcaggactgcgtagcagcgcctgacaagctttaaatgccgcgtcgccatcgctttggataatcgcatcgacaatcgcctgatgcagatccagctttatcactgtgtcgctggtaatactcgtgaagtaagtgtgataaacgctatggaataggctggcgaaactggtcaaaaacggattggcgctcatttcatagatatgctcatgccaggccatatcgacttcgatccagcgttcacggcgaaagttctcttttaatgccgccatttcggccattaacgtattgagatgcgctttctgttccgcggtgccaaccgttgctgccagtaggcaggcttgcggctccagacagatacgcataaccagaaagtgatcgatgacctgatgaaagttctcttctgtcatccaccaggtaagcaattcctgatcaagaaaattccagttgctttgtggcatgacccgagtaccaattcgcggtcgcggtaaaaccatcccttttgccgttaacgttttgaccgcttcgcgtaccgctgtacgactcactccaaattgctcgcccagctcaatctcaccgggcaaaatggtgccgggttcatattcaccttttaagatccgttgcgccagcttctcagccagaacatagctaaggtttttctgtgcagctaactgttgtgcgcttaaaggcattacttatcttcctttttctttttattcctccttagtatgccaccaggaagtgtgattacggttgcaaaaacggcaaattgcttgttttatggcacattaacggggcttttgctgaaaaaatgcgcggtcagaaaattattttaaatttcctcttgtcaggccggaataactccctataatgcgccaccactgacacggaacaacggcaaacacgccgccgggtcagcggggttctcctgagaactccggcagagaaagcaaaaataaatgcttgactctgtagcgggaaggcgtattatgcacaccccgcgccgctgagaaaaagcgaagcggcactgctctttaacaatttatcagacaatctgtgtgggcactcgaagatacggattcttaacgtcgcaagacgaaaaatgaataccaagtctcaagagtgaacacgtaattcattacgaagtttaattctttgagcgtcaaacttttaaattgaagagtttgatcatggctcagattgaacgctggcggcaggcctaacacatgcaagtcgaacggtaacaggaagaagcttgcttctttgctgacgagtggcggacgggtgagtaatgtctgggaaactgcctgatggagggggataactactggaaacggtagctaataccgcataacgtcgcaagaccaaagagggggaccttcgggcctcttgccatcggatgtgcccagatgggattagctagtaggtggggtaacggctcacctaggcgacgatccctagctggtctgagaggatgaccagccacactggaactgagacacggtccagactcctacgggaggcagcagtggggaatattgcacaatgggcgcaagcctgatgcagccatgccgcgtgtatgaagaaggccttcgggttgtaaagtactttcagcggggaggaagggagtaaagttaatacctttgctcattgacgttacccgcagaagaagcaccggctaactccgtgccagcagccgcggtaatacggagggtgcaagcgttaatcggaattactgggcgtaaagcgcacgcaggcggtttgttaagtcagatgtgaaatccccgggctcaacctgggaactgcatctgatactggcaagcttgagtctcgtagaggggggtagaattccaggtgtagcggtgaaatgcgtagagatctggaggaataccggtggcgaaggcggccccctggacgaagactgacgctcaggtgcgaaagcgtggggagcaaacaggattagataccctggtagtccacgccgtaaacgatgtcgacttggaggttgtgcccttgaggcgtggcttccggagctaacgcgttaagtcgaccgcctggggagtacggccgcaaggttaaaactcaaatgaattgacgggggcccgcacaagcggtggagcatgtggtttaattcgatgcaacgcgaagaaccttacctggtcttgacatccacggaagttttcagagatgagaatgtgccttcgggaaccgtgagacaggtgctgcatggctgtcgtcagctcgtgttgtgaaatgttgggttaagtcccgcaacgagcgcaacccttatcctttgttgccagcggtccggccgggaactcaaaggagactgccagtgataaactggaggaaggtggggatgacgtcaagtcatcatggcccttacgaccagggctacacacgtgctacaatggcgcatacaaagagaagcgacctcgcgagagcaagcggacctcataaagtgcgtcgtagtccggattggagtctgcaactcgactccatgaagtcggaatcgctagtaatcgtggatcagaatgccacggtgaatacgttcccgggccttgtacacaccgcccgtcacaccatgggagtgggttgcaaaagaagtaggtagcttaaccttcgggagggcgcttaccactttgtgattcatgactggggtgaagtcgtaacaaggtaaccgtaggggaacctgcggttggatcacctccttaccttaaagaagcgtactttgtagtgctcacacagattgtctgatagaaagtgaaaagcaaggcgtttacgcgttgggagtgaggctgaagagaataaggccgttcgctttctattaatgaaagctcaccctacacgaaaatatcacgcaacgcgtgataagcaattttcgtgtccccttcgtctagaggcccaggacaccgccctttcacggcggtaacaggggttcgaatcccctaggggacgccacttgctggtttgtgagtgaaagtcgccgaccttaatatctcaaaactcatcttcgggtgatgtttgagatatttgctctttaaaaatctggatcaagctgaaaattgaaacactgaacaacgaaagttgttcgtgagtctctcaaattttcgcaacacgatgatgaatcgaaagaaacatcttcgggttgtgaggttaagcgactaagcgtacacggtggatgccctggcagtcagaggcgatgaaggacgtgctaatctgcgataagcgtcggtaaggtgatatgaaccgttataaccggcgatttccgaatggggaaacccagtgtgtttcgacacactatcattaactgaatccataggttaatgaggcgaaccgggggaactgaaacatctaagtaccccgaggaaaagaaatcaaccgagattcccccagtagcggcgagcgaacggggagcagcccagagcctgaatcagtatgtgtgttagtggaagcgtctggaaaggcgcgcgatacagggtgacagccccgtacacaaaaatgcacatattgtgagctcgatgagtagggcgggacacgtggtatcctgtctgaatatggggggaccatcctccaaggctaaatactcctgactgaccgatagtgaaccagtaccgtgagggaaaggcgaaaagaaccccggcgaggggagtgaaaaagaacctgaaaccgtgtacgtacaagcagtgggagcacgcttaggcgtgtgactgcgtaccttttgtataatgggtcagcgacttatattctgtagcaaggttaaccgaataggggagccgaagggaaaccgagtcttaactgggcgttaagttgcagggtatagacccgaaacccggtgatctagccatgggcaggttgaaggttgggtaacactaactggaggaccgaaccgactaatgttgaaaaattagcggatgacttgtggctgggggtgaaaggccaatcaaaccgggagatagctggttctccccgaaagctatttaggtagcgcctcgtgaattcatctccgggggtagagcactgtttcggcaagggggtcatcccgacttaccaacccgatgcaaactgcgaataccggagaatgttatcacgggagacacacggcgggtgctaacgtccgtcgtgaagagggaaacaacccagaccgccagctaaggtcccaaagtcatggttaagtgggaaacgatgtgggaaggcccagacagccaggatgttggcttagaagcagccatcatttaaagaaagcgtaatagctcactggtcgagtcggcctgcgcggaagatgtaacggggctaaaccatgcaccgaagctgcggcagcgacgcttatgcgttgttgggtaggggagcgttctgtaagcctgcgaaggtgtgctgtgaggcatgctggaggtatcagaagtgcgaatgctgacataagtaacgataaagcgggtgaaaagcccgctcgccggaagaccaagggttcctgtccaacgttaatcggggcagggtgagtcgacccctaaggcgaggccgaaaggcgtagtcgatgggaaacaggttaatattcctgtacttggtgttactgcgaaggggggacggagaaggctatgttggccgggcgacggttgtcccggtttaagcgtgtaggctggttttccaggcaaatccggaaaatcaaggctgaggcgtgatgacgaggcactacggtgctgaagcaacaaatgccctgcttccaggaaaagcctctaagcatcaggtaacatcaaatcgtaccccaaaccgacacaggtggtcaggtagagaataccaaggcgcttgagagaactcgggtgaaggaactaggcaaaatggtgccgtaacttcgggagaaggcacgctgatatgtaggtgaagcgacttgctcgtggagctgaaatcagtcgaagataccagctggctgcaactgtttattaaaaacacagcactgtgcaaacacgaaagtggacgtatacggtgtgacgcctgcccggtgccggaaggttaattgatggggtcagcgcaagcgaagctcttgatcgaagccccggtaaacggcggccgtaactataacggtcctaaggtagcgaaattccttgtcgggtaagttccgacctgcacgaatggcgtaatgatggccaggctgtctccacccgagactcagtgaaattgaactcgctgtgaagatgcagtgtacccgcggcaagacggaaagaccccgtgaacctttactatagcttgacactgaacattgagccttgatgtgtaggataggtgggaggctttgaagtgtggacgccagtctgcatggagccgaccttgaaataccaccctttaatgtttgatgttctaacgtggacccgtgatccgggttgcggacagtgtctggtgggtagtttgactggggcggtctcctcctaaagagtaacggaggagcacgaaggttggctaatcctggtcggacatcaggaggttagtgcaatggcataagccagcttgactgcgagcgtgacggcgcgagcaggtgcgaaagcaggtcatagtgatccggtggttctgaatggaagggccatcgctcaacggataaaaggtactccggggataacaggctgataccgcccaagagttcatatcgacggcggtgtttggcacctcgatgtcggctcatcacatcctggagctgaagtaggtcccaagggtatggctgttcgccatttaaagtggtacgcgagctgggtttagaacgtcgtgagacagttcggtccctatctgccgtgggcgctggagaactgaggggggctgctcctagtacgagaggaccggagtggacgcatcactggtgttcgggttgtcatgccaatggcactgcccggtagctaaatgcggaagagataagtgctgaaagcatctaagcacgaaacttgccccgagatgagttctccctgactccttgagagtcctgaaggaacgttgaagacgacgacgttgataggccgggtgtgtaagcgcagcgatgcgttgagctaaccggtactaatgaaccgtgaggcttaaccttacaacgccgaagctgttttggcggatgagagaagattttcagcctgatacagattaaatcagaacgcagaagcggtctgataaaacagaatttgcctggcggccgtagcgcggtggtcccacctgaccccatgccgaactcagaagtgaaacgccgtagcgccgatggtagtgtggggtctccccatgcgagagtagggaactgccaggcatcaaattaagcagtaagccggtcataaaaccggtggttgtaaaagaattcggtggagcggtagttcagtcggttagaatacctgcctgtcacgcagggggtcgcgggttcgagtcccgtccgttccgccaccctaattaggggcgtagttcaattggtagagcaccggtctccaaaaccgggtgttgggagttcgagtctctccgcccctgccagaaatcatccttagcgaaagctaaggattttttttatctgaaataaccctctccgaagtaaatccttctaccggcatccttgccagccattcatattaatacacttcatccagcacgttaattttcaaaagatcgcgaatcaacgcatttttatcgctattttgcagccatatggcataaagcggccgactaagtgttgtgctatcgacaacggtatgcaggccgccttttttacgcgcccagctgacgggtagccaggtgcaaccattaagcatcgcaatctgttgctgtgccagttcagcagaactggttgtcagaatgggcacttcgtcagcaccgatcaaacctgcctcatgctgttgaaaatctggcccccactcaagtcgcagataattaagatctccctttagtttactaggggcactggtataaagcgctaaagtgaaatatcccagcaactgactactaaattcgtccattttgggcgcttcagtggtaataagaagatcaagctggcgttcatgcagctgttttaccagagactgccgttgggcaattcgcgcttcgaactgtaagcctgtatgggcatcctgattttgatacaagcgtcccagccactgattaagcatacattcccacaagctggcgctggcaccgatagaaaactcgttatgtcgactggtatgcgccacctccttacgggcggcctgccaggtgctcatgagcgtttctgcataaggcagtagtttttcaccggcagcggttaaacggatattgtttctgtggcgggtgaaaaggttcacacccagttgattttccagttgtctgattcgaaagctcactgcactctgggtcagatagaggctttcagccgctcgaccaaagtgacgcgttcggctaacttccaggaaagtttttaacaattccgtatccacagtgctctccgcaaaattatttgtcgttatgatttaaatgttttgttttacactctgtcaagcgtaactaatactccgcgccataactagctcggtcaaagaattaggagcgtgcaggatggcggaaagctttacgacgactaatcgatatttcgacaataaacattatccacgtggattctctcgtcatggtgatttcaccatcaaagaggcacaactgcttgagcgtcatggttatgccttcaatgagttggatcttggcaaacgcgagccggttaccgaggaagagaaactcttcgtagcagtatgccgtggcgaacgtgagccagtgacagaagcagaacgcgtgtggtccaagtatatgacgcgtattaagcgtccaaaacgttttcacaccctttccggcggtaaaccgcaggttgaaggtgctgaagactacaccgattctgacgattaataaaaagggcgaaatgccctttttttatgtcagtagtttctgcagatggatgagcaaacggtcaatcgctcgatagctaactgcctcctgcaaatgctgacgtgtgataatgtcagactgatcaatatcagcaatggttcgtgcaactttcaataaccgctgccaggcacgaatgcttaaccccagatggatcagtgttccttccaaccacatcgcatcttcgctctcaagtttgcagaattggcgtatttccggactatccagccaggcattcagtttattctgccgcttaaattggcgctctctggcggccattacgcgttgtttaacggtggcgctgctttctcccggcactaccgttttactcaaaatgccggggggtggtaatgggatctccagactgagatcgaagcggtcgagaaagggcccgctgagccggttgagataacgtaatgtctgttctggcgtgcagcggttatggtttccctgataatgtccggtagggctgggattcatcgccgcaacaagctggaaacgggctggataggttatttttgctcgtgtgcgactaagatggatctgcccggattcaatcggctctcgcaaggcatccagtgtacgccgttcaaattcaggtagctcatcaagaaaaagcacgccgttatgcgccaggctaatttcaccgggccctggaattgcgccaccgcctaccatcgcagttaagcttgcactgtgatgaggactgcggaacgggcgctgccgccattgtttttgtacactttcagcatttaccagacttaatatcgcagcactctccagtgcctcttcattgcttaaatctggcaacaggccattaatacggctggcgagcattgttttacctgttcccggcggcccaatcagtaaaaggttgtgcccgccagcagcggtaatttccagtcctcgctttccttgttcctgaccgataacatcactgagatcatgttgtagcgcccgggatactgcatcagttggtttcgggcgttcgagagcgtgcttaccttccagaaacgcacagacagcttgcagatgatcggctatcaggcatccttcaccgttaattagccccacttcatcttcgttatctttcgcgacgataatttttctgccgctcttaatagcttcagttgcactggagattgcgccgggaacgccacgcagagcgcctgtaagcgccagttctccgactaattcatattcatctaacttattggctgtaagctgttcactggccgccagcaacgcaatggcgataggtaaatcatatcgtcccccttcttttggcagatcagctggagccaggttgatggtgatttttttcgccggatattcatatccgctattgataatggcgctgcgcacgcgatcgcgagcttcttttaccgttgtttctggtaagcccaccatcgttaagccgggtagacctttactgatatgtacctcaacagtgatcgggggcgcatttactcccagggctgcgcgggtatgaacaatactcagactcataagccctccttgagtcaccattatgtgcataagatatcgctgctgtagcccgctaattcgtgaattttagtggctgattcctgtttatttgtgcaagtgaagttgagttgttctggcggtggaatgatgctcgcaaaaatgcagcggacaaaggatgaactacgaggaagggaacaacattcatactgaaattgaatttttttcactcactattttatttttaaaaaacaacaatttatattgaaattattaaacgcatcataaaaatcggccaaaaaatatcttgtactatttacaaaacctatggtaactctttaggcattccttcgaacaagatgcaagaaaagacaaaatgacagcccttctacgagtgattagcctggtcgtgattagcgtggtggtgattattatcccaccgtgcggggctgcacttggacgaggaaaggcttaaagatcaagccttaacgaactaagacccccgcaccgaaaggtccgggggttttttttgaccttaaaaacataaccgaggagcagacaatgaataacagcacaaaattctgtttctcaagattcaggacggggaactaactatgaatggcgcacagtgggtggtacatgcgttgcgggcacagggtgtgaacaccgttttcggttatccgggtggcgcaattatgccggtttacgatgcattgtatgacggcggcgtggagcacttgctatgccgacatgagcagggtgcggcaatggcggctatcggttatgctcgtgctaccggcaaaactggcgtatgtatcgccacgtctggtccgggcgcaaccaacctgataaccgggcttgcggacgcactgttagattccatccctgttgttgccatcaccggtcaagtgtccgcaccgtttatcggcactgacgcatttcaggaagtggatgtcctgggattgtcgttagcctgtaccaagcacagctttctggtgcagtcgctggaagagttgccgcgcatcatggctgaagcattcgacgttgcctgctcaggtcgtcctggtccggttctggtcgatatcccaaaagatatccagttagccagcggtgacctggaaccgtggttcaccaccgttgaaaacgaagtgactttcccacatgccgaagttgagcaagcgcgccagatgctggcaaaagcgcaaaaaccgatgctgtacgttggcggtggcgtgggtatggcgcaggcagttccggctttgcgtgaatttctcgctgccacaaaaatgcctgccacctgtacgctgaaagggctgggcgcagtagaagcagattatccgtactatctgggcatgctggggatgcacggcaccaaagcggcaaacttcgcggtgcaggagtgtgacctgctgatcgccgtgggcgcacgttttgatgaccgggtgaccggcaaactgaacaccttcgcgccacacgccagtgttatccatatggatatcgacccggcagaaatgaacaagctgcgtcaggcacatgtggcattacaaggtgatttaaatgctctgttaccagcattacagcagccgttaaatcaatgactggcagcaacactgcgcgcagctgcgtgatgaacattcctggcgttacgaccatcccggtgacgctatctacgcgccgttgttgttaaaacaactgtcggatcgtaaacctgcggattgcgtcgtgaccacagatgtggggcagcaccagatgtgggctgcgcagcacatcgcccacactcgcccggaaaatttcatcacctccagcggtttaggtaccatgggttttggtttaccggcggcggttggcgcacaagtcgcgcgaccgaacgataccgttgtctgtatctccggtgacggctctttcatgatgaatgtgcaagagctgggcaccgtaaaacgcaagcagttaccgttgaaaatcgtcttactcgataaccaacggttagggatggttcgacaatggcagcaactgttttttcaggaacgatacagcgaaaccacccttactgataaccccgatttcctcatgttagccagcgccttcggcatccatggccaacacatcacccggaaagaccaggttgaagcggcactcgacaccatgctgaacagtgatgggccatacctgcttcatgtctcaatcgacgaacttgagaacgtctggccgctggtgccgcctggcgccagtaattcagaaatgttggagaaattatcatgatgcaacatcaggtcaatgtaagcgctcgcttcaatccagaaaccttagaacgtgttttacgcgtggtgcgtcatcgtggtttccacgtctgcagtatgaatatggccgccgccagcgatgcacaaaatataaatatcgaattgaccgttgccagcccacggagcgtcgacttactgtttagtcagttaaataaactggtggacgtcgcacacgttgccatctgccagagcacaaccacaagtcaacaaatccgcgcctgagcgcaaaaggaatataaaaatgaccacgaagaaagctgattacatttggttcaatggggagatggttcgctgggaagacgcgaaggtgcatgtgatgagccacgcgctgcactatggcactagcgtttttgaaggcatccgttgctacgacagccacaaaggaccggttgtattccgccatcgtgagcatatgcagcgtctgcatgactccgccaaaatctatcgcttcccggttagccagagcattgatgagctgatggaagcttgtcgtgacgtgatccgcaaaaacaatctcaccagcgcctatatccgtccgctgatcttcgtcggtgatgttggcatgggagtaaacccgccagcgggatacagtaccgacgtgattatcgctgctttcccgtggggagcgtatctgggcgcagaagcgctggagcaggggatcgatgcgatggtttcctcctggaaccgcgcagcaccaaacaccatcccgacggcggcaaaagccggtggtaactacctctcttccctgctggtgggtagcgaagcgcgccgccacggttatcaggaaggtatcgcgctggatgtgaacggttatatctctgaaggcgcaggcgaaaacctgtttgaagtgaaagatggtgtgctgttcaccccaccgttcacctcctccgcgctgccgggtattacccgtgatgccatcatcaaactggcgaaagagctgggaattgaagtacgtgagcaggtgctgagccgcgaatccctgtacctggcggatgaagtgtttatgtccggtacggcggcagaaatcacgccagtgcgcagcgtagacggtattcaggttggcgaaggccgttgtggcccggttaccaaacgcattcagcaagccttcttcggcctcttcactggcgaaaccgaagataaatggggctggttagatcaagttaatcaataaatacaaaaaatgggacggcacgcaccgtcccatttacgagacagacactgggagtaaataaagtatgcctaagtaccgttccgccaccaccactcatggtcgtaatatggcgggtgctcgtgcgctgtggcgcgccaccggaatgaccgacgccgatttcggtaagccgattatcgcggttgtgaacagcttcacccaatttgtaccgggtcacgtccatctgcgcgatctcggtaaactggtcgccgaacaaattgaagcggctggcggcgttgccaaagagttcaacaccattgcggtggatgatgggattgccatgggccacggggggatgctttatagtctgccatctcgcgaactgatcgctgattccgttgagtatatggtcaacgcccactgcgccgacgccatggtctgcatctctaactgcgacaaaatcaccccggggatgctgatggcttccctgcgcctgaatattccggtgatctttgtttccggcggcccgatggaggccgggaaaaccaaactttccgatcagatcatcaagctcgatctggttgatgcgatgatccagggcgcagacccgaaagtatctgactcccagagcgatcaggttgaacgttccgcgtgtccgacctgcggttcctgctccgggatgtttaccgctaacagtatgaactgcctgaccgaagcgctgggcctgagccagccgggcaacggcagcctgctggcaacccacgccgaccgtaagcagctgttccttaatgctggtaaacgcattgttgaattgaccaaacgttattacgagcaaaacgacgaaagtgcactgccgcgtaatatcgccagtaaggcggcgtttgaaaacgccatgacgctggatatcgcgatgggtggaagcactaacaccgtacttcacctgctggcggcggcgcaggaagcggaaatcgacttcaccatgagtgatatcgataagctttcccgcaaggttccacagctgtgtaaagttgcgccgagcacccagaaataccatatggaagatgttcaccgtgctggtggtgttatcggtattctcggcgaactggatcgcgcggggttactgaaccgtgatgtgaaaaacgtacttggcctgacgttgccgcaaacgctggaacaatacgacgttatgctgacccaggatgacgcggtaaaaaatatgttccgcgcaggtcctgcaggcattcgtaccacacaggcattcagccaagattgccgttgggatacgctggacgacgatcgcgccaatggctgtatccgcagcctggaacacgcctacagcaaagacggcggcctggcggtgctctacggtaactttgcggaaaacggctgcatcgtgaaaacggcaggcgtcgatgacagcatcctcaaattcaccggcccggcgaaagtgtacgaaagccaggacgatgcggtagaagcgattctcggcggtaaagttgtcgccggagatgtggtagtaattcgctatgaaggcccgaaaggcggtccggggatgcaggaaatgctctacccaaccagcttcctgaaaagtatgggtctcggcaaagcctgtgcgctgatcaccgacggtcgtttctctggtggcacctctggtctttccatcggccacgtcagtccggaagcggcaagcggcggcagcattggcctgattgaagatggtgacctgatcgctatcgacatcccgaaccgtggcattcagttacaggtaagcgatgccgaactggcggcgcgtcgtgaagcgcaggacgctcgaggtgacaaagcctggacgccgaaaaatcgtgaacgtcaggtctcctttgccctgcgtgcttatgccagcctggcaaccagcgccgacaaaggcgcggtgcgcgataaaagcaaactggggggttaataatggctgacagccaacccctgtccggtgctccggaaggtgccgaatatttaagagcagtgctgcgcgcgccggtttacgaggcggcgcaggttacgccgctacaaaaaatggaaaaactgagcagccgtcttgataacgtcattctggtgaagcgcgaagatcgccagccagtgcacagctttaagctgcgcggcgcatacgccatgatggcgggcctgacggaagaacagaaagcgcacggcgtgatcactgcttctgcgggtaaccacgcgcagggcgtcgcgttttcttctgcgcggttaggcgtgaaggccctgatcgttatgccaaccgccaccgccgacatcaaagtcgacgcggtgcgcggcttcggcggcgaagtgctgctccacggcgcgaactttgatgaagcgaaagccaaagcgatcgaactgagtcagcagcaggggttcacctgggtgccgccgttcgaccatccgatggtgattgccgggcaaggcacgctggcgctggaactgctccagcaggacgcccatctcgaccgcgtatttgtgccagtcggcggcggcggtctggctgctggcgtggcggtgctgatcaaacaactgatgccgcaaatcaaagtgatcgccgtagaagcggaagactccgcctgcctgaaagcagcgctggatgcgggtcatccggttgatctgccgcgcgtagggctatttgctgaaggcgtagcggtaaaacgcatcggtgacgaaaccttccgtttatgccaggagtatctcgacgacatcatcaccgtcgatagcgatgcgatctgtgcggcgatgaaggatttattcgaagatgtgcgcgcggtggcggaaccctctggcgcgctggcgctggcgggaatgaaaaaatatatcgccctgcacaacattcgcggcgaacggctggcgcatattctttccggtgccaacgtgaacttccacggcctgcgctacgtcagtgaacgctgcgaactgggcgaacagcgtgaagcgttgttggcggtgaccattccggaagaaaaaggcagcttcctcaaattctgccaactgcttggcgggcgtagcgtcaccgagttcaactaccgttttgccgatgccaaaaacgcctgcatctttgtcggtgtgcgcctgagccgcggcctcgaagagcgcaaagaaattttgcagatgctcaacgacggcggctacagcgtggttgatctctccgacgacgaaatggcgaagctacacgtgcgctatatggtcggcggacgtccaagccatccgttgcaggaacgcctctacagcttcgaattcccggaaagtccgggcgcgctgctgcgcttcctcaacacgctgggtacgtactggaacatttctttgttccactatcgcagccatggcaccgactacgggcgcgtactggcggcgttcgaacttggcgaccatgaaccggatttcgaaacccggctgaatgagctgggctacgattgccacgacgaaaccaataacccggcgttcaggttctttttggcgggttaaggaaaaatgcctgatagcgcttcgcttatcaggcctacccgcgcgacaacgtcatttgtggttcggcaaaatcttccagaatgcctcaattagcggctcatgtagccgctttttctgcgcacacacgcccagctcaaacggcgttttctcatcgctgcgctctaaaatcatcacgcggttacgcaccggttcggggctgttttccagcaccacttccggcaacaatgccacgccacagccgagtgccaccatgcttaccatcgcttcatgcccgccaaccgtggcgtaaatcatcgggttactgattttattgcgtcgaaaccacagttcaatgcggcggcgtaccggcccctgatcggccataataaacggcaccgtactccagtccggcttctctacgctcacctgattacgcaccgggcagggcagcgcgggggcaatcagcactactgccagattctccagcatgctaaacgccactgcgccgggcaaggtttccggtttacccgcaatcgccagatccgcttcaccagtgaccaccttttccatcgcatctgccgcatcaccagtagtaagtttaatctccacgctcgggtgttccgcgcggaagcgatccagaatcggcggcagatggctgtaggcagcggtcacgctgcagaagatatgtaattcgccagagaggctcggcccttgctgatcgatggtgtggcgcaactgctgatactgcaacagcgtttgctgggcgaaaacgcgcagctcttcgcccgcttcagtcagcgtcaccgtgcggttatcgcgcacaaacagcggctgaccgagatcttcttccaggcgctgaatctgccgactgagcgtggatgggctaacgtgcatcgcccgcgcgctgcggccaaaatggcggctttccgccagatgcaggaaggttttcagatcgcgtaaatccacagggacagccctcgatgttgacgttgcaaaaattgcaatgtgacgttgtgaatatatcaatttccgcaataaatttcctgtcatatagtgaattcaatctcgcaaacgcgaaccgaacaataagaagcacaacatcacgaggaatcaccatggctaactacttcaatacactgaatctgcgccagcagctggcacagctgggcaaatgtcgctttatgggccgcgatgaattcgccgatggcgcgagctaccttcagggtaaaaaagtagtcatcgtcggctgtggcgcacagggtctgaaccagggcctgaacatgcgtgattctggtctcgatatctcctacgctctgcgtaaagaagcgattgccgagaagcgcgcgtcctggcgtaaagcgaccgaaaatggttttaaagtgggtacttacgaagaactgatcccacaggcggatctggtgattaacctgacgccggacaagcagcactctgatgtagtgcgcaccgtacagccactgatgaaagacggcgcggcgctgggctacagccacggtttcaacatcgtcgaagtgggcgagcagatccgtaaagatatcaccgtagtgatggttgcgccgaaatgcccaggcaccgaagtgcgtgaagagtacaaacgtgggttcggcgtaccgacgctgattgccgttcacccggaaaacgatccgaaaggcgaaggcatggcgattgccaaagcctgggcggctgcaaccggtggtcaccgtgcgggtgtgctggaaagctccttcgttgcggaagtgaaatctgacctgatgggcgagcaaaccatcctgtgcggtatgttgcaggctggctctctgctgtgcttcgacaagctggtggaagaaggtaccgatccagcatacgcagaaaaactgattcagttcggttgggaaaccatcaccgaagcactgaaacagggcggcatcaccctgatgatggaccgtctctctaacccggcgaaactgcgtgcttatgcgctttctgaacagctgaaagagatcatggcacccctgttccagaaacatatggacgacatcatctccggcgaattctcttccggtatgatggcggactgggccaacgatgataagaaactgctgacctggcgtgaagagaccggcaaaaccgcgtttgaaaccgcgccgcagtatgaaggcaaaatcggcgagcaggagtacttcgataaaggcgtactgatgattgcgatggtgaaagcgggcgttgaactggcgttcgaaaccatggtcgattccggcatcattgaagagtctgcatattatgaaagtctgcacgagctgccgctgattgccaacaccatcgcccgtaagcgtctgtacgaaatgaacgtggttatctctgataccgctgagtacggtaactatctgttctcttacgcttgtgtgccgttgctgaaaccgtttatggcagagctgcaaccgggcgacctgggtaaagctattccggaaggcgcggtagataacgggcaactgcgtgatgtgaacgaagcgattcgcagccatgcgattgagcaggtaggtaagaaactgcgcggctatatgacagatatgaaacgtattgctgttgcgggttaagtgcgcgctgatgccctcaccccgaccctctcccacagggagagggagaaaacactcaaggccttctcctggagaaggccttgctattagttgcggtacagcaccttaatgatgtgatatccgaactgggtgtgcagcgggccggtcggctccagtaccggacaagagaaaaccactttatcgaacgccggaaccatctgaccctggcggaattcacctaaatcaccgccgcgtttgccacttgggcaaatggagtgtttcttcgccagcttgccgaaatcggccccgttcttaatctgctcgagaagatccagagccagtttctcttcttttacaaggatatgcagtgctgctgctgtttttgccatgatcgtgccttgagtgaataattgtcaggcggcgattttagcatgatccgcagatgctaacgtaattgtcagtcagggagtggctggtacatatatggcaaaagcccggaaaatccgggcttcgcaggtccctcaaggggagaaaacttagggcctctatgggctacaaagtcattatcggggatggttattttattgtcaatttatgaggcttatggcattgatactcttgatgaccgccctctgtatgtctgcaaccaactcatgtggcaaacattgattaagataccctctgtaagtccttgctctgtttaatctgtttcgactgacttgttgtaccaggtcggctttggcccaacgaatctgctgatcaaagaattgcaggtcattgataacattactggctatttcaacatgcattccacgttttaacttgtctggtcggctgtggttgataatggaacgacgatgcatgcgttgccattaatttttccgttgagcacgacaactaacctgttttttatcatttcaggaggaatgcggccatcgtaatacgtcgtgctgaacggtccattttggctaacaggatagttaccaaagttgcattccagtatttcaccaaccttagggctgaaattaatcgccacgagtaaacctctccttagtaaactctgaaaaagtaataacacaacgttacgacccgatattttctaagtctaatggattcacgatgaactccgatttcggtcttctctctctgatttaaacatccgcagccaaccggttagcggcttacacgcggtcacattcaaatgcgattctgctacaatcctccccccgttcgaagattgagcaatacacctatgcgtctaaaccccggccaacaacaagctgtcgaattcgttaccggcccctgcctggtgctggcgggcgcgggttccggtaaaactcgtgttatcaccaataaaatcgcccatctgatccgcggttgcggttatcaggcgcggcacattgcggcggtgacctttactaataaagcagcgcgcgagatgaaagagcgtgtagggcagacgctggggcgcaaagaggcgcgtgggctgatgatctccactttccatacgttggggctggatatcatcaaacgcgagtatgcggcgcttgggatgaaagcgaacttcagcttgtttgacgataccgatcagcttgctttgcttaaagagttgaccgaggggctgattgaagatgacaaagttctcctgcaacaactgattagcaccatctctaactggaagaatgatctcaaaacaccgtcccaggcggcagcaagtgcgattggcgagcgggaccgtatttttgcccattgttatgggctgtatgatgcacacctgaaagcctgtaacgttctcgacttcgatgatctgattttattgccgacgttgctgctgcaacgcaatgaagaagtccgcaagcgctggcagaacaaaattcgctatctgctggtggatgagtatcaggacaccaacaccagccagtatgagctggtgaaactgctggtgggcagccgcgcgcgctttaccgtggtgggtgacgatgaccagagcatctactcctggcgcggtgcacgtccgcaaaacctggtgctgctgagtcaggattttccggcgctgaaggtgattaagcttgagcagaactatcgctcttccgggcgtattctgaaagcggcgaacatcctgatcgccaataacccgcacgtctttgaaaagcgtctgttctccgaactgggttatggcgcggagctaaaagtattaagcgcgaataacgaagaacatgaggctgagcgcgttactggcgagctgatcgcccatcacttcgtcaataaaacgcagtacaaagattacgccattctttatcgcggtaaccatcagagccgggtgtttgaaaaattcctgatgcaaaaccgcatcccgtacaaaatatctggtggtacgagctttttctctcgtcctgaaatcaaggacttgctggcttatctgcgcgtgctgactaacccggacgatgacagcgcatttctgcgtatcgttaacacgccgaagcgagagattggcccggctacgctgaaaaagctgggtgagtgggcgatgacgcgcaataaaagcatgtttaccgccagctttgatatgggcctgagtcagacgcttagcggacgtggttatgaagcattgacccgcttcactcactggttggcagaaatccagcgtctggcggagcgggagccgattgccgcggtgcgtgatctgatccatggcatggattatgaatcctggctgtacgaaacaagccccagcccgaaagccgccgaaatgcgcatgaagaacgtcaaccaactgtttagctggatgacggagatgctggaaggcagtgaactggatgagccgatgacgctcacccaggtggtgacgcgctttactttgcgcgacatgatggagcgtggtgagagtgaagaagagctggatcaggtgcaactgatgactctccacgcgagcaaagggctggagtttccttatgtctacatggtcggtatggaagaagggtttttgccgcaccagagcagcatcgatgaagataatatcgatgaggagcggcggctggcctatgtcggcattacccgcgcccagaaggaattgacctttacgctgtgtaaagaacgccgtcagtacggcgaactggtgcgcccggagccgagccgctttttgctggagctgccgcaggatgatctgatttgggaacaggagcgcaaagtggtcagcgccgaagaacggatgcagaaagggcaaagccatctggcgaatctgaaagcgatgatggcggcaaaacgagggaaataatcaaggccggaaaagatgcgtcagcatcgcatccggcacttactcattaatgcacttccagcggccagtggacatagctctgccactggctttcctgagcaataatctctttacccagcggatgttgggttagccaaccttgcggaagcgtcaaggtcaacagttcatggttagcctgtaatgtcatctctggcacgagatcgtcacggcgacggctggcaaaaatgatggccaggcgtagtaaacggcagagttgttctgcgacgcgcggcggtacggcattttgctgatgcaggctactgagatcgaccggattagtctggttgagcagtagcgtcgccagcaattttttctgtgcgggggtaaaaccgggaagatccagattacgcaccagataagcagcgtgttgcggcgcttgtttgaagtcaacgctcaggccgatttcatgaagctgacaggcgctgatgagcaaatcgcggcttattgcttcaagatgccattcgttttccacctgatcgaagaagttagccgcaactttggctacgcgctgtgcctgatcaatatcgatcataaagcggcgttgaatattacgcagcgtacggctgcgaatatcctgctcgacggccagatgcaacatgccgtagaccaggccttcacgcagcgcaccgcccgccagggtcatacactgaatattcagttcggtaaaaatggcgatcaggatcgccagaccactcgggaacactaacgcacgttccagcgtcagcccgtcaatctccagttcctccagccgaccgcaatgaatggctcgctgtttcaattgctgcaacttttccagggtaatgcgttcatccatcccctgtgccatcatgatttcctgtaacgcctgcacggtgccggaagcaccaacgcacactttccagccgtgataccgtaattcatcggcaaccggacgtaacacttcgcgtgccgctttttctgcagcatcaaaattttcctgccccagattacgatcggcaaaatagcgttccagccaggtgacgcagcccatgctcaggctgaacaagctggtggtttgtgcacccgtgccggttaccagttcagtactggctccgcctatatccaccaccaggcgctgatcggcaccaccagtggtgtgagcaacgccctgataaatcagacgtgcttcctcttcaccgctgatcacctgtaccggacaaccgagaatttcctgcgctttggcaataaaatcacccgcattgacggcaaggcgtaacgtcgccgtagcgacaacgcgaatttggctgggaggaatatcttgcagacgttcagcaaacaggcgcaaacattgccaaccgcgctccattgcttcattggagagggcattttcgctattcaggccagcagccagacgcactttgcgttttattcgcgtcagcgtctggatgcttccagccacctcgcgcacaaccagcatatgaaaactattgctaccgagatcaatggctgcatacaggctgctggtggaacccatactcttcatccttcaatctgtctctgtgttggctgcattctttcacctgaatcacttactacagtaagctcatcgggattcattctcttgccatcttgatacagtttgaatgattttgagtatgacattttttatttaaccactacgacgacgattacgcggagcgccagtacgacgcggaccattgcctgtgcgcgggcgcgtgaggcgcagcggttttggcagatcggtcatcaatgcgtccggattgtatttgcttaccggaatactgtgaccaatataggtctcaatagcaggcaaattcaatgcatactcttcacacgccaggctgatagagtgaccgcttgcgcctgcgcgacctgtacgaccaatacggtgaacgtaatcttcacagtcatcgggtaaatcgtagttaaagacgtgcgtcactgccggaatatgcaaaccacgcgcggcaacgtcggtggcaaccagaatatccagatcgccacgggtaaattcatcaagaatacgcagacgttttttctgcgcgacatcgcctgtcaataaaccgacacgatgaccatctgctgccaggtggccccagatctcttcacaacggtgtttggtgttggcgaaaataatcgctctgtctggccactcttcttcgatcagcgtttgcagcaaacgcattttttcttcgttagaagggtagaaaagctcttctttaatacggtggcccgttttctgttccggttccacttcaatatattcggcattgttcatctgctcgaacgccagttcacgtacccggtagctaagcgtggcggagaacagcatgttgaggcgctggtttgcaggcggcatacggcggaacagccagcggatatctttaataaagcccagatcgtacatgcgatcggcttcgtccagtaccaccacctgaatggcaccgaggttaatgtggttctgcttggcgtagtcaattaaacgccccgtggtgccaatcagaatgtcaacgccgctttccagcactttcagctgtttgtcgtagccatcaccaccgtaagccagacccagcttcaggccagtagcttccgccagcggttctgcgtcggcatggatctgcacggcaagttcacgcgtcggtgccataattaaggcacgcggctgattcaccttgcgatcggcaatcgcaggatgagagagaagataatgaaacgtactcgtaagaaacgccatcgttttcccggtaccggtttgcgcctgcccggctacgtcacgacccgccagcgtcagcggaagggccagtgcctgaatgggcgtacagttatgaaacccttttttttcaagggcttctacaaccttcggatgcagggcgaagtcggaaaacttctgttctgttaaatgtgttttgctcatagtgtggtagaatatcagcttactattgctttacgaaagcgtatccggtgaaataaagtcaacctttagttggttaatgttacaccaacaacgaaaccaacacgccaggcttattcctgtggagttatatatgagcgataaaattattcacctgactgacgacagttttgacacggatgtactcaaagcggacggggcgatcctcgtcgatttctgggcagagtggtgcggtccgtgcaaaatgatcgccccgattctggatgaaatcgctgacgaatatcagggcaaactgaccgttgcaaaactgaacatcgatcaaaaccctggcactgcgccgaaatatggcatccgtggtatcccgactctgctgctgttcaaaaacggtgaagtggcggcaaccaaagtgggtgcactgtctaaaggtcagttgaaagagttcctcgacgctaacctggcgtaagggaatttcatgttcgggtgccccgtcgctaaaaactggacgcccggcgtgagtcatgctaacttagtgttgacttcgtattaaacataccttattaagtttgaatcttgtaatttccaacgcttcccgttttatcttaaatgcgaagtgaacagatttctggcagcagtctcaatccgtcttgtcgtttcagttctgcgtactctcctgtgaccaggcagcgaaaagacatgagtcgatgaccgtaaacaggcatggatgatcctgccataccattcacaacattaagttcgagatttaccccaagtttaagaactcacaccactatgaatcttaccgaattaaagaatacgccggtttctgagctgatcactctcggcgaaaatatggggctggaaaacctggctcgtatgcgtaagcaggacattatttttgccatcctgaagcagcacgcaaagagtggcgaagatatctttggtgatggcgtactggagatattgcaggatggatttggtttcctccgttccgcagacagctcctacctcgccggtcctgatgacatctacgtttcccctagccaaatccgccgtttcaacctccgcactggtgataccatctctggtaagattcgcccgccgaaagaaggtgaacgctattttgcgctgctgaaagttaacgaagttaacttcgacaaacctgaaaacgcccgcaacaaaatcctctttgagaacttaaccccgctgcacgcaaactctcgtctgcgtatggaacgtggtaacggttctactgaagatttaactgctcgcgtactggatctggcaagtcctatcggtcgtggtcagcgtggtctgattgtggcaccgccgaaagccggtaaaaccatgctgctgcagaacattgctcagagcattgcttacaaccacccggattgtgtgctgatggttctgctgatcgacgaacgtccggaagaagtaaccgagatgcagcgtctggtaaaaggtgaagttgttgcttctacctttgacgaacccgcatctcgccacgttcaggttgcggaaatggtgatcgagaaggccaaacgcctggttgagcacaagaaagacgttatcattctgctcgactccatcactcgtctggcgcgcgcttacaacaccgttgttccggcgagtggtaaagtgttgaccggtggtgtggatgccaacgccctgcatcgtccgaaacgcttctttggtgcggcgcgtaacgtggaagagggcggcagcctgaccattatcgcgacggcgcttatcgataccggttctaaaatggacgaagttatctacgaagagtttaaaggtacaggcaacatggaactgcacctctctcgtaagatcgctgaaaaacgcgtcttcccggctatcgactacaaccgttctggtacccgtaaagaagagctgctcacgactcaggaagaactgcagaaaatgtggatcctgcgcaaaatcattcacccgatgggcgaaatcgatgcaatggaattcctcattaataaactggcaatgaccaagaccaatgacgatttcttcgaaatgatgaaacgcagttaaatttgtcttatgccaaaaacgccacgtgtttacgtggcgttttgcttttatatctgtaatcttaatgccgcgctggcgatgttaggaaaattcctggaatttgctggcatgttatgcaatttgcatatcaaatggttaatttttgcacaggactggtgggtttggaacggactttcccttctgaataaaggtcttcgtggttatacttctgctaataattttctctgagagcatgcattgtgaatttactgacagtgagtactgatctcatcagtatttttttattcacgacactgtttctgttttttgcccgtaaggtggcaaaaaaagtcggtttagtggataaaccaaacttccgcaaacgtcaccagggattgatacctctcgttggggggattagcgtttacgcagggatttgcttcacgttcggaattgtcgattactatattccgcatgcatctctctatctcgcttgtgccggtgtgcttgttttcattggcgcgctggatgaccgttttgatatcagcgtaaaaatccgtgccaccatacaggccgctgttggcattgttatgatggtgttcggcaagctttatctcagtagcctgggttatatctttggctcctgggagatggtgctcggaccgtttggttacttcctgacgctatttgccgtctgggcggccattaatgcgttcaacatggttgatggcattgatggcttgctgggcgggttgtcctgcgtcagctttgcagcaatcggtatgattttgtggttcgacgggcaaaccagcctcgcaatctggtgctttgcgatgatcgccgccatcctgccatacatcatgcttaaccttggtatcctgggtcgccgctacaaagtctttatgggtgatgcgggcagtacgctgattggttttaccgttatctggatcctgctcgaaacgacccagggcaaaacccatcccatcagcccggttaccgctttgtggataatcgccattccgctaatggatatggtggcgattatgtaccgtcgcctgcgtaaaggcatgagcccattctctcctgaccgtcagcatattcaccatttgatcatgcgtgccgggtttacttcccgtcaggcgtttgtgctgattacccttgccgcagcactgctcgcttccattggcgtgctggcagaatattctcattttgtcccggagtgggtcatgctggtgctctttttgctagcattcttcctctatggatattgcattaagcgtgcctggaaagttgctcgctttattaagcgcgtaaaacgcagactgcgtagaaatcgtggtggcagccccaatttaaccaaataaatgaggatgtgatgacacaaccaatgcctgggaaaccggccgaagacgctgaaaatgaactggatattcgtgggttgtttcgtaccttgtgggctgggaagctatggattattggcatggggctggcgtttgcgttaatcgcgctggcgtatacgttttttgctcgtcaggagtggagcagcacggcgattaccgatcgtccaacggtgaatatgctggggggatattacagccagcagcaatttttgcgtaacctggatgtccgtagtaacatggcttctgccgaccaaccaagcgtcatggacgaagcctataaagagtttgttatgcaactggccagctgggatacccgcagagagttctggctgcaaaccgactattacaaacagcggatggtgggcaacagcaaagccgatgcggcgttgctggatgaaatgattaacaacatccagtttatccccggagactttacccgcgcggtcaatgacagcgtgaagcttattgccgaaaccgcgcctgacgctaataacctgttacgtcagtatgttgcttttgccagccagcgtgcagccagccatctgaatgatgagctgaaaggcgcatgggcggcgcgtaccatccagatgaaagctcaggtgaagcgtcaggaagaggtggcgaaagccatctacgaccgccggatgaacagcattgagcaggcgctgaaaattgctgagcagcataatattagccgcagtgcgacagatgtacctgccgaggaattacctgatagtgaaatgttcctgcttgggcgtccaatgcttcaggctcgactggaaaatttacaggccgtcggtccggcctttgatctcgactatgatcagaatcgggccatgttaaacaccctgaatgttggtccaaccctggatccgcgttttcagacctatcgctatttgcgtacgccggaagaaccggtaaaacgcgatagcccacgtcgtgccttcctgatgattatgtggggcattgtcggggggctgatcggggctggtgtcgcattaacccgccgttgcagcaaataacaacactgctgcggtgagcgcaaaggcgctcgccgcttattcgaagagaatcgatgtgaaagtactgactgtatttggtacgcgcccggaagccatcaagatggcgccgttggtgcatgcgttggcaaaagatcctttttttgaggctaaagtttgcgtcactgcgcagcatcgggagatgctcgatcaggtgctgaaactcttttccattgtacctgactacgatctcaacataatgcagccaggacagggcctgacagagataacctgtcggattctggaagggctaaaacctattcttgccgagttcaaaccagacgtcgtgctggttcacggcgatacgacgacgacgctggcaaccagcctggcggcgttttatcagcgtattcctgttggtcacgttgaggctggtctgcgcacgggcgatctctatagcccgtggccggaagaggctaaccgtacattgaccgggcatctggcgatgtatcacttctctccaaccgaaacttcccggcaaaacttgctgcgtgaaaacgttgcggatagccgaatcttcattaccggtaatacagtcattgatgcactgttatgggtgcgtgaccaggtgatgagcagcgacaagctgcgtagtgaactggcggcaaattacccgtttatcgaccccgataaaaagatgattctggtgaccggtcacaggcgtgagagtttcggtcgtggctttgaagaaatctgccacgcgctggcagacatcgccaccacgcaccaggacatccagattgtctatccggtgcatctcaacccgaacgtcagagaaccggtcaatcgcattctggggcatgtgaaaaatgtcattctgatcgatccccaggagtatttaccgtttgtctggctgatgaaccacgcctggctgattttgaccgacagtggcggcattcaggaagaagcgcctagcctggggaaacctgtgctggtgatgcgcgataccactgagcgtccggaagcggtgacggcgggtacggtgcgtctggtaggcacggataagcagcgaattgtcgaggaagtgacgcgtcttttaaaagacgaaaacgaatatcaagctatgagccgcgcccataacccgtatggtgatggtcaggcatgctctcgcattctggaagcgttaaaaaataatcggataagtctatgagttttgcgaccatttctgttatcggactgggttatatcgggctgccaacggcagcagcgtttgccagtcggcaaaaacaggtaattggtgtcgatatcaaccaacatgcggttgataccatcaatcgtggcgaaatccatatcgtcgaacctgatttggcgagtgtagtaaaaactgccgtagaaggcggttttttacgagcgagcacgacgccagttgaagcggatgcctggctgattgctgtacccacgccgtttaagggcgatcatgagccagatatgacctacgttgaaagcgctgctcgctccattgcgccagtgctgaaaaaaggcgcgctggtgatccttgaatccaccagcccggtggggagtaccgagaagatggcagaatggttagcagagatgcgtccggatctcactttcccgcagcaggtgggcgagcaggcggacgtcaacattgcttactgcccggaacgcgtgttaccaggacaggtaatggtcgagctgattaaaaacgatcgcgtgattggtggtatgacgccggtttgtagcgcccgcgccagcgaactgtacaaaattttcctcgaaggtgagtgtgtcgtcactaacagccggacggcggaaatgtgtaagctcaccgaaaacagcttccgcgatgtgaatatcgcttttgctaatgaattgagcctgatttgtgccgatcaggggattaacgtctgggaactgattcgcctggcgaatcgtcaccctcgcgttaatattcttcagcctggccctggcgtgggcggtcactgcattgctgttgatccgtggtttatcgtggcacagaacccccagcaggcgcggcttatccgtaccgcgcgcgaagtgaacgatcacaaaccgttctgggttatcgatcaggtgaaagcggcggtggctgattgcctggcggctaccgataaacgcgccagtgaactgaaaatcgcctgctttggtctggcgtttaaaccgaatattgatgacctgcgcgaaagcccggcgatggaaatcgctgaactgatcgcccagtggcatagcggcgaaactctggttgttgagcctaacatccaccagttgccgaaaaaactgaccgggctttgtactctggcgcagcttgacgaggcgctggcaacggcagacgtgctggtgatgctggtcgatcatagtcagttcaaagttatcaatggcgacaatgtccatcagcagtatgtcgtcgatgccaaaggagtctggcgctgatgagaaaaattctgataacaggtggtgccgggtttattggcagcgcgctggtgcgttatatcatcaacgaaacgagcgacgcggtggtagtggtcgataagctgacctacgccggaaacctgatgagcctggcaccggtcgcgcaaagcgagcgctttgcctttgagaaagttgatatctgcgatcgggcagaactggcacgcgtattcactgagcatcagccagactgtgtcatgcatctggcagccgaaagccatgttgaccgttctattgacggcccggcagcgtttattgaaaccaacattgtcgggacttatacattgcttgaagcggcgcgggcttactggaatgcgctgacggaagataaaaaaagtgcgttccgttttcatcatatctccactgacgaagtatatggtgacctgcacagcacggatgatttcttcaccgaaaccacgccgtatgcgccgagcagcccttattccgcgagtaaagccagcagcgaccatctggtgcgcgcctggctgcggacctatggtctgccgacgcttatcaccaactgcagcaataactacggcccttaccactttccggaaaaactgatcccgctgatgatcctcaacgcgctggcgggtaaaagcctgccggtatatggcaacgggcagcaaatccgtgactggctgtatgtggaagatcacgcccgcgcgctgtattgcgtggcgaccaccgggaaagtcggtgaaacctataatattggtggtcacaacgagcgtaagaatctcgatgttgtggaaaccatttgcgagctgctggaagaactggctccgaacaagccgcacggcgtggcgcactatcgtgacctgatcacctttgtcgctgaccgtccggggcatgatctgcgttatgccattgatgctagcaaaattgcccgtgaacttggctggctgccgcaggaaacctttgaaagtggaatgcgtaaaacggttcagtggtatctggctaatgaaagctggtggaagcaggtgcaggacggcagctatcagggcgagcgtttaggtctgaaaggctaattttcagcggaggcaaacatgaaaggtattatcctggcgggcggttccggcacccgattgcatccgattacgcgcggcgtaagcaagcaactgttgccgatttacgataagccaatgatttactatccgctgagcgtgctgatgctggccggtatccgcgaaattctcatcatcactacgccggaagataaaggttatttccagcgcctgctgggcgatggtagtgagttcggtatccagctggaatatgccgaacagcccagcccggacggtctggcgcaggcctttatcatcggtgaaaccttccttaatggtgaaccttcttgtctggtgctgggcgataacatcttcttcggtcagggcttcagtccgaagctgcgtcatgttgcggcgcgcaccgaaggggcgacggtttttggctatcaggtgatggacccggaacgctttggcgtggtggagtttgacgacaatttccgcgctatcagcctggaagaaaagccaaaacagccgaagagtaactgggcggtgaccgggctttatttctacgacagtaaagtcgtggagtacgcaaagcaggtgaagccgagcgagcgtggtgaactggagattacctccatcaaccagatgtacctcgaggcgggcaacctgaccgttgaactgctcgggcgcggatttgcctggctggataccggcactcacgacagcctgattgaagccagcacctttgtacagacggtggaaaaacgccagggctttaagattgcctgcctggaagagattgcctggcgtaacggctggctcgatgacgagggtgtgaagcgtgctgccagtagtttagcgaaaactggctacggccaatatctgctggagttacttcgtgcccgtccgcgccagtattgagccactaacctgggaaaacgccttctttggtgttaacagcgccatcgtgcgcattacgtctgaagcaccgctcctgacgccagacgcgttagcgccgtggtcacgggtgcaggccaaaattgcggcaagtaatacgggtgaactggatgccctgcaacagctgggattctccctggtagaaggtgaagttgatttggcgctacccgtgaacaatgccagtgatagcggtgctgtagtggcacaagagaccgatattcccgcattacgtcagttagccagcgccgcatttgcgcaaagccgttttcgtgcgccgtggtatgcgcctgacgccagcagtcgcttttatgcacagtggattgaaaatgccgtgcgcggcacctttgatcatcaatgtctgattttacgtgcggcgtccggcgatattcgcggctatgtctctttacgggaactcaatgcgacagatgcgcgaattggcctgctggctggacgcggtgcaggtgctgagctgatgcaaacggcgctaaactgggcgtatgctcgcggtaaaacaactttgcgggtggcgacccaaatgggcaacaccgccgcgcttaaacgatacatacaaagtggtgcgaatgtagaaagcaccgcgtactggttatacaggtgatcacatgattccatttaacgcaccgccggtggtgggaaccgaactcgactatatgcagagcgcaatgggtagcggcaaactgtgtggcgatggcggttttacccgtcgctgccagcagtggctggagcaacgttttggcagcgccaaagtgttactgacgccgtcctgcaccgctagcctggagatggcggcgctgctgctcgatatccagcctggcgatgaagtgatcatgccgagctacacctttgtctccaccgccaatgcctttgtgctgcgtggcgcaaaaatcgtttttgtggatgttcgcccggacaccatgaacatcgacgaaacgctgattgaagcggcgatcaccgacaaaacgcgcgttatcgtgccggtccattacgcgggtgtggcctgcgaaatggacaccattatggcgttggcgaaaaagcataatttgtttgtggtagaagatgccgctcagggcgtgatgtccacttacaaagggcgtgcactgggaaccattggtcatattggctgctttagcttccatgaaaccaaaaactacacggcgggcggtgaaggcggcgcgacgctgattaacgataaagcgttaatcgaacgagccgagatcatccgtgaaaagggcactaaccgcagccagttcttccgtggtcaggtcgataaatatacctggcgcgatattggctccagctatttgatgtccgatctgcaagctgcatacctgtgggcgcaactggaagcagcggatcgtatcaaccagcaacgtctggcgctgtggcaaaactactacgatgcgttagcgcctctggcgaaagccgggcgtatcgagctgccgagcattcccgatggctgcgtgcagaacgcgcatatgttctacattaaactgcgggatattgatgaccggagcgcgttgattaactttctgaaagaagcggaaatcatggcggtgtttcattacattccgctgcacggttgccctgcgggggaacactttggtgagttccacggtgaagatcgctacaccaccaaagagagcgagcgcctgctgcgcctgccgctgttctacaacctgagccccgtcaatcagcgtacggtaattgcgactttgttgaactacttttcctgatatgagcttggcaaaagcgtccttgtggacggcggccagtacactggtcaagattggtgccgggttactggtcggtaagttgctggcggtgagttttggtccggcggggcttgggctggcggcaaatttccgccagttgattaccgtgctcggcgtgcttgccggggctggcatctttaacggtgtaaccaaatacgttgcccagtaccatgataatccgcaacagctgcgccgcgtggtcggcactagtagtgcgatggtacttggtttctctacgctgatggcgctggtttttgtgctggcagctgcgccaatcagccagggattgtttggtaataccgactatcaggggctggtgcgtttagtggcgctggtgcaaatggggatcgcctggggcaacctgttactggcgctgatgaaaggctttcgcgatgccgcaggtaatgcgttaagcctgattgtcggcagcttgattggcgttctcgcgtactacgtcagttaccgtttgggcggttatgaaggggcgttgctgggtctggcgctgattcccgcgctggtggtaattcctgccgccatcatgttgatcaaacgtggtgtcatcccgttaagctatctgaaacccagctgggataacggtctggcagggcagttgagcaaatttacgctcatggcgttgattacgagcgtgaccttgcctgttgcttacatcatgatgcgtaaactgctggcggcgcagtatagctgggatgaggtggggatctggcaaggggtgagcagtatttccgatgcctacctgcaatttattacggcaagcttcagcgtatatttgctgcccacgttgagccggctaacggaaaagcgcgatatcacccgggaagtggttaaaagcctgaaattcgtcttaccggcagtggcggcggcgagttttaccgtctggctgctgcgtgattttgctatctggctgctgttgagcaataaatttaccgctatgcgcgatctctttgcctggcagttagtgggtgatgtgttaaaagtgggcgcttatgtctttggttatctggtgatcgccaaagcgagtctgcggttttatattctggcggaagtcagccagttcactttattgatggtatttgcccactggctaatccctgcgcatggtgcactgggcgcggcgcaggcatatatggcaacttatatcgtctatttttctctttgttgtggcgtgtttttactctggcgtaggcgggcatgactgtactgattcacgtactgggaagcgatatccctcaccataaccgaaccgttttgcggtttttcaatgacgcgctggccgcgacgagcgagcacgcgcgcgagtttatggttgttggcaaggacgacggcttaagtgatagctgtccggcgctttctgtgcaatttttccctgggaaaaaaagcctggcggaagcggtcatcgcgaaagcaaaagctaaccgtcagcagcgttttttcttccacggtcagttcaatcccacactgtggctggctctgctgagtggtggcattaagcccagccagtttttctggcatatctggggggcagacctgtatgagctttccagtggcttgagatataagcttttttacccactacgtcgcctggcgcaaaagcgagtcggctgtgtatttgccacccgcggcgatttgagcttttttgccaaaacgcacccaaaggtgcggggcgaactgctgttcttcccgacgcggatggaccctagcctcaatacgatggcgaacgatcggcaacgtgaagggaaaatgaccattctggtggggaactccggcgaccgcagcaatgagcatattgctgccttgcgcgccgttcatcagcaatttggcgatacggtaaaagtggtggtgccgatgggatatccgcctaataacgaagcgtacattgaggaagttcgtcaggcggggctggagttattcagcgaagaaaatctacaaattctgagcgaaaaactggaatttgacgtctatctggcgctacttcgtcagtgcgatcttggttactttatttttgcccgccagcagggcattggtacgctgtgcttactgattcaggcgggcattccttgtgtgcttaaccgggaaaatccgttctggcaggatatgacggaacaacatttgccggtgctgtttactaccgacgatctcaacgaggatattgtgcgtgaagcgcagcgccagttggcgagcgtggataaaaacaccattgccttctttagccctaactatctacaaggctggcagcgggcgttggcgattgccgccagggaggtcgcatgagtctgctgcaattcagtggcctgtttgttgtctggctgctctgcacgctgtttattgccacgctgacctggtttgagtttcgccgtgtgcgctttaacttcaatgtcttctttagtttgctgtttttgctcacctttttcttcggcttcccgctgaccagcgtgctggtatttcgctttgatgttggtgtcgcgccgccagaaatcttgttgcaggcgttgctttctgcgggctgcttctacgcggtttactatgtcacctacaaaacccgcctacgcaaacgcgttgctgatgtaccgcgccgtccgctgtttaccatgaaccgcgtggagaccaatcttacgtgggtgatcctgatgggtatcgcgctggtaagcgtcggcatcttcttcatgcacaacggctttttgctgttccggcttaactcctacagtcagatcttttccagtgaagtctccggcgtggcgttaaaacgcttcttttactttttcatcccggcgatgctggtggtctactttctgcgccaggacagcaaagcgtggctgtttttcctcgtcagcacggtcgcctttggcttgctgacttatatgattgtcggcggcactcgcgccaatatcatcatcgcattcgctatcttcctgtttattggcattattcgcggctggattagcttgtggatgctggcggcggcgggcgtgctggggattgttggcatgttctggctggcactaaaacgctatggaatgaatgtgagcggcgatgaagcgttctatacgtttctctatctcactcgcgacaccttcagcccgtgggagaatctggcgttgctgttgcagaactacgacaacatcgacttccagggcctggctccaattgtccgcgatttctatgtctttatcccttcctggctgtggccgggtcgcccgagtatggtgctgaacagtgccaactactttacctgggaagtgctgaataaccactccggactggcgatcagccctacgcttataggcagtctggtggtgatgggcggcgcgttgttcatcccgctcggggcgatcgtggttggtctgatcatcaaatggttcgactggctgtatgagctgggcaaccgcgagcctaatcgctataaagctgcgatattgcacagtttctgctttggggcgatcttcaatatgatcgtgctggcgcgtgaagggctggatagctttgtcagtcgcgtggtcttttttatcgtggtcttcggcgcatgtctgatgatcgcaaaactgttgtactggctttttgaaagcgccggactcattcataaacgtacaaaaagtagcctccggacgcaggttgaaggataacaatgaataacaacaccacggcaccaacctatacgctgcgtggcttacagttgattggttggcgtgatatgcagcacgccctcgattatctgtttgctgacgggcagcttaagcagggaacgctggttgccattaatgctgaaaaaatgctgactattgaagataacgccgaggtcagggagttaattaacgctgccgaatttaaatatgcggatggcatcagcgttgtacgtagtgtacgtaaaaagtacccgcaggcgcaggtttcccgcgttgccggtgccgatctctgggaagagctgatggcgcgcgcaggcaaagaagggacgccggtatttcttgtgggcggtaaacctgaagtgctggcgcaaactgaagctaaactgcgcaaccagtggaatgtgaatatcgttggcagtcaggatggttattttaaacccgagcagcgtcaggcgctgtttgaacgcattcatgccagcggtgcgcaaatcgtcaccgttgcgatgggaagcccaaagcaggagatcatcatgcgcgactgccgtctggtacatccagatgcgctgtatatgggcgttggcgggacttacgatgttttcaccggtcacgtaaaacgcgcaccgaaaatctggcaaacgctggggctggagtggctctaccgcctgcttagccagccgagccgcattaagcgtcagcttcgtttgctgcgttatttacgctggcactacaccggcaacctatgattttcctctctttgtaaagcgacggagtggtcactccgtcgcctgtctgcttttttattacacaaagcattcaaatttttaatgctttatttgccatttctcctgaattacgaaaacatttgcaacactcgatgtacccataacgataaccggtaacaccggaaagcatgcaaacacaacacgaggatttatggcagataacaaaccagagctacagcgtgggctggaagctcgacatatcgaactcatcgccctggggggcaccattggcgtcggcctgtttatgggggccgccagtaccctgaaatgggccgggccatccgtattgttggcctatatcatcgccgggctgttcgtctttttcatcatgcgtagtatgggcgaaatgttgttcctcgaaccggttaccggtagcttcgccgtttatgcgcatcgttatatgagcccgttctttggctatctcaccgcctggtcttactggtttatgtggatggcggtggggatctctgaaatcaccgccattggcgtttatgtccagttctggttcccggagatggcgcagtggatacccgcattgatcgcagtggcgctggtggcgttggcgaatctggcggcggtgcggttgtacggcgaaatcgagttctggttcgcgatgatcaaagtcaccacgattatcgtgatgattgtcattggcctgggcgtgattttctttggctttggcaatggcgggcagagcattggttttagcaatctcacagagcatggcggtttctttgcgggtggctggaaagggttcctgaccgctctgtgtattgtggtggcgtcctaccagggcgtggagctgattggcattactgccggtgaagcgaagaatccgcaggtgacgctgcgcagtgccgtaggcaaggtgctgtggcggatcctgattttctacgtaggcgcgattttcgttatcgtcaccatcttcccgtggaatgaaataggcagcaacggcagcccgttcgtactgacttttgccaaaatcggtattaccgcagcggcgggcattatcaactttgtggtgctgacggctgcgctctctggctgtaacagcggcatgtacagttgcggacgtatgctctacgcactggcgaaaaaccgtcagttaccggcggcaatggcgaaagtttcccgtcacggcgtaccggttgcgggtgtggcagtatctattgctattctgctaattggcagttgcctgaactacatcattcccaatccgcagcgtgtgtttgtctacgtctacagtgccagcgtgcttccggggatggtgccatggtttgtgatattgataagccagctgcgttttcggcgtgcacataaagcggcgattgccagccatccgttccgcagtatcctgttcccgtgggccaattacgtaacaatggcattcctgatttgcgttttgatcggcatgtactttaatgaagatacgcgtatgagcctgtttgttggcatcatctttatgctggcggtgacggcgatttataaagtttttggccttaatcgccacgggaaagcgcataaactggaggaataagcagcaaaacgcacaaaccgtaaccaaacgcgcaatttatttaaaaagggactagacagaggggtgggaagtccgtattatccacccccgcaacggcgctaagcgcccgtagctcagctggatagagcgctgccctccggaggcagaggtctcaggttcgaatcctgtcgggcgcgccatttagtcccggcgcttgagctgcggtggtagtaataccgcgtaacaagatttgtagtggtggctatagctcagttggtagagccctggattgtgattccagttgtcgtgggttcgaatcccattagccaccccattattagaagttgtgacaatgcgaaggtggcggaattggtagacgcgctagcttcaggtgttagtgtccttacggacgtgggggttcaagtccccccccctcgcaccacgactttaaagaattgaactaaaaattcaaaaagcagtatttcggcgagtagcgcagcttggtagcgcaactggtttgggaccagtgggtcggaggttcgaatcctctctcgccgaccaattttgaaccccgcttcggcggggttttttgttttctgtgcatttcgtcaccctcccttcgcaataaacgcccgtaataactcattgccccacggtatgatttcgcccttaacgtattgaaggatgacttcaggcaaggagcgaccatgctgcaacaggttccaacgcgtgcttttcatgtgatggcgaaaccgagcggttccgattgtaatctgaactgtgactactgtttttatctcgaaaaacaatccctttaccgcgaaaagccagtcacgcatatggacgatgacacgctggaagcgtatgtccgtcactatatcgctgccagcgaaccgcaaaacgaagtggcttttacctggcagggcggcgaaccaacgctactcgggctggcgttttaccgccgtgccgtagcgctacaggcgaaatatggtgctggcaggaagataagtaacagcttccagactaacggcgtgctgctggatgacgaatggtgcgcgtttctcgcggagcatcattttcttgttggtttaagcctggatggcccgcctgagatccacaatcaatatcgcgtgactaaaggtggcagacccacgcataagctggtgatgcgtgccctgacgctcctgcaaaaacatcatgtcgactataacgtgctggtctgcgttaatcgcaccagcgcgcagcaaccgttgcaggtatatgattttttgtgcgatgcgggagtcgaattcatccagtttattccggtggtcgagcgcctggctgatgaaacaactgcccgcgatggacttaagttacatgcgcctggtgatattcagggtgagctaacggaatggagcgtgcgccccgaggagttcggtgagtttctggtggcgatattcgaccactggatcaaacgcgacgtcggcaagattttcgtgatgaatatcgaatgggcgtttgccaattttgtcggtgcgccgggtgcggtttgccatcatcagccaacctgtgggcgcagcgtgattgttgagcacaacggcgacgtttacgcctgtgatcactatgtttatccgcaatatcggctggggaatatgcaccagcaaacaattgcagaaatgatcgattccccgcaacagcaggcgtttggtgaagataaatttaagcagttaccggcgcagtgtcgcagttgtaacgtgttaaaagcgtgctggggaggctgcccgaaacaccgcttcatgctcgatgccagcggcaaaccgggactgaattatttgtgtgccgggtatcagcgttatttccgccatctaccgccatatcttaaagcaatggctgatttgctggcgcacggtcgcccggccagcgacattatgcatgcgcatttgctggtggtgagtaagtaaaaatcggcggccgcctgcggttgattgccggatgcggcgtaaacgccttatccggcctacatgatcgtgcaaattcaataaattgcagcgttctgtaggctggataagatgcgtcagcatcgcatccggcaaaggcagatctcagcgatagcgccggcttagtcagatttaatctgcgcgcgtggtggatattttttcaggatctccatatacgcgtgcatttcggtctgtagcggtacacccatcggaatatggcgcacgccgatggagtcgctttcctgcggatcggtgtagaggttaaacacgctgcttcccgccgtttgcattactgtgccggtgaatccaccctgatatccgctctgggtataagcgtaaggttgctgaatcaggacgtgatacttgaactcatccatacgcacagcagcgagtttaccgttgaggaagtagtgctcggccttacggttagactgaccatttgttcccaggaagaaggatgtctggtccacaccatcgataaaggtggttttcggcactaaattcgccactttcgctccaggatgccctgccagatccagcgcggtagggaagagatctgccagatcgacaataccgtcagatttacgcggttggatcatccctttccagtaaacgaaagtcggtacgcgaacgccgccttcccaggtgctacctttcgcaccacggaacggggtgcgtccgtgcggcggtacttcggcttccggtccgttatcggaggtaaagacgatcagcgtgttatcaagctgaccgtttttctccagtgttttatacagattagcgaacacatcgttcatctccaccatgcagtcgccatagctggtgcgtgccggagagctacccgcatatttcgcatttgggtagttatcgaagtggcagccacgagtgccgtagtagaggaagaatggtttatcgctcttcgccatcttgtcgaggaacttaacgccatagtccatccagcgttgatccagatcttccatatatttcggcgtaatgtcggcaatggcctgttgttcgccgccgcgcaccgcatgaacgtcatctttgctgaacggtaattgcttgatgtattcagaacggtccggactcagggccacttccggattgacgtgaacgtcgcgccattcggtgtacatatcagacacgctgttaaagccacggaaatcatcaaagccaacgttctgcggctggctctctttgttttcccccatatgccattttccgatggcctgagtgacgtagccctgatcgtgcagcaactgcggcagcgtggttaacccttgcagcccgcccggttgcccgtacattggcggcatcagaatgccgtggtggatggagtattgtccggtgagaatggtggcgcgggttggggaagagcttggttgagaatacgcgctagttaaaatcagcccctggctggcaacggcgtcgatatctggtgtagggttacccaccgccacgccgccaccgttaaaaccgacgtccatccagcccacatcgtccagcaagaaaacaaccacattcggtttcttaccggtttttttctcaagttctgccagcttctgctgggtttctttatcctgcgccggatgctgcattactggcatcatattgtcggcaatagtggtcgccggtttaaccagatactggtttgggtgatcgtatccggcaaagcctttgcgtgcggtggcagtactcggggtatctgctgcgctggccatgagaggaagagcggcggcgacagcaacaacaagacgtttgggactaaagctaaattccatgcaaaatgctccggtttcatgtcatcaaaatgatgacgtaattaagcattgataattgagatccctctccctgacaggatgattacataaataatagtgacaaaaataaattatttatttatccagaaaatgaattggaaaatcaggagagcgttttcaatcctacctctggcgcagttgatatgtaaggcaggtttattatatcgcgttgattattgatgctgtttttagttttaacggcaattaatatatgtgttattaattgaatgaattttatcattcataataagtatgtgtaggatcaagctcaggttaaatattcactcaggaagttattactcaggaagcaaagaggattacagaattatctcataacaagtgttaagggatgttatttcccgattctctgtggcataataaacgagtagatgctcattccatctcttatgttcgccttagtgcctcataaactccggaatgacgcagagccgtttacggtgcttatcgtccactgacagatgtcgcttatgcctcatcagacaccatggacacaacgttgagtgaagcacccacttgttgtcatacagacctgttttaacgcctgctccgtaataagagcaggcgtttttttatgtatcaggaaggccccggaggtgcttgcctccgggtgagaaggaattactgtggcgggttattctgcaacgttaacatcaaaccgtcgcgacgcatagctgcagcttcttccggcttgtgcagtctgtccagcgcgtcggcaagccatgcgtaatcgtaggcgtccggacgttgtttcagcgctgcgcggaaggcgaggcttgcttcctgccattctccgtgcttcatcagactctggcccagtgtgctccacaacagcgggcgatcgccgacgtttttgatttgctggcgcagcactttttccagctgttccggattgtttgttttcagtcgaggaatcggcagcagtaggcgatcgtcgtactggcgtttcaggccatcgatgataatttgctgggcagtatcatgatcgtcacattcaataagatgttccgccattgccacctgcaacgctacctgatgacgcgttttccggctttggtttttccaccagttacgcaaaccttcgctaccgttatcggcacgcgcctgatccatcaggccaatccatgcctgttgttccagcattgcacgatgttcttcatcaccaacatgggctttcgccatacttgggataatatccagcaggctactccatgcacctgtgcggatatacgcctgttccgccagacgtaatacttccggatggcgtggcgtaacttccagcagcttatccacgccgtggcgtgcagcatggttttcattacgggccagttgcagacgtacgcgggtgatttctaccggaatggtgtcgttgccggccagctccgctgcgcgttccagatgttggttggcgcgtgcttcatcaccacgttgttgcgcggcttcggcagccagtagatagttcaccaccggttgttccgcgtgatcggcatttttcgccatcagcttttcaacttgctgataatcgccttccgccagtttcagcagcgcctgttcggtctgcttacgtgcacggcgacgcttacgtccgacaaaccacccacgggtgtgcgcgccagtgcggaagatccgccgcagtagccactcaatggcaaacagcactaccatcgccagaatcaatatgatcgccaggcccgtgacgctggtttcgatattgtagttgtcggtctggatcagcacataaccctgatggccggcaatcatcgggccaaccacgatccccgcaatcagcaacacaaagagcaataacacttttagcatggttattctccttgcggcgcggctgccggagtatcagcttgcggtgcaggtgcaggtttagcttccgttgtccccgctgccggttgtgccagcaggttacgcacgcgagtctgcatcagtttttccagcatcgcctggctttgcagggtttccggaagatccatgctgatattttgctggcttaactggtccacctcgtcgaggaacgctttggtggtggcatcatcagtatcgtagtaagcacgtacccaggtggagacgttctccagcgcctggcgataagtctcttcctggtgacgcggtacagcttgtgctgcgaccagcaggcgagagcgaatattttcgcgcagatagatatcctgatttggcgctaacagcggtacggcggtgtcatcacgacggcgaatcgtaatgaagttgtccataaagttctgccagcttttttgcagattgatacgccattcgctgatggaactggaaagctcttcaccgtcactatccatcgggctaccatcgctgtcattatcggccagacgcaggttatctacctgattactaagctgattaagcttaaggatgatgccgtcataatccacctggcttactgcagaaaggctggcgatatcatcggtaattgcccgacgaacggtaatcagactcgggtcattcatatccgccaggctggcgtctgcacttttcagcaacgctgcagcggtcgtgacgtcctgatcgctccacagcttccgtccggcgagtttcaccagaaaatcggcctgagccagcagccaggttttagcatcgctgccggaaatggtggcgaccttttgttggacttcatccaactgttttgccagcgtttcttgctgacgattcgcctgcttaagttgtgcagcttgttgcttaataatgccttccagctcggctttttggctctcctgggctttttgcaatgccgtcagttggttagccagggcatcgctggtggcggtctgattgacggcctgttgtttaccccagccatacaaaccgatgcccgccgccagagcaatagcgatagccaccgcgctgagaatcaatgcggtattgttcttactctttttttctgttgcgacaggttgactcgtggtgtccacggcctccctggtctcttcaaccacggcggaggttttttcttgttccgtcattatggcttcctgttatgagagttattgtaatgcccgtaaaagcgcatcgttgtcagcgttatcggcgaccttaatgtcttgccagcccagttcccgggcgagtttcgccaaacgctcactgacgaccaatagtcgacagtgtagtaaccagtgctcacgataccattgtgggatcaggctccagagttgctgcaacatttcaccgctggtaacaacgaccatcgtcacctcgcgggcttgccagcgcatcgcttcttctgcaccatcgtaatggattgcgcatcgttgataacattcacaaaaagtgacctcagcaccgcgcgccgtcagggtatccccaattagctcacgaccaccattgccacgtaatatcagcgcacgtttgcccgcaatattttgtaattcaggtaattgtagcaagacttcgctgatttcccgatcctgcgggtagagaatcttctgtccacttacggtatgtagtgccagtgcggtggtgcgtccaatggcgaaataatcaggtagtcggggccatttacgatcttgctgatgcagctgactttgggcaaaagcaaccgcgtgttggctgagggcaaacaacagatcgctctcccccagcgctgccagttgatcagcaagttgcggtaattgttgacccggagaaaactcaatcagcggaaaatgccaggccacctgccccagtgtgcgcagacggctcactaactcttctccagcgggagacgggcgggtgacaaggatactcatgccggggcgtctccgttatagacttcagcgaggatctcgcgcgcgccgttattcagtagctcttctgccaggctaatccccatttgttcggcatcttgcggcgcaccgcggcgttcaccgcgaataatctggctaccgtccggcgcgccgaccagcgcacgcagccagatttcgccatcaataagctcggcgtagctaccaattggcacctgacatccgccttcgagacgggtattcatggcgcgttctgcggtaacgcgcagtgcagtttcgtggtgattcagcgcggcaagcagctcgcgagtgcgactatcatcaaggcggcattcaatacccaccgcaccttgtcctaccgccggaagagaaatctcgggtggcaacgcggcgcgaatacgactctccagacctaaacgttttagtccggctacggcaagaatgatggcatcgtattcgccgttatccagtttgctcaggcgagtgccgacgttgccgcgcagggagcggataatcagatccggacggcgttcagccagttggcactggcgacgtaaactggacgtcccgacgatactgcctgccggtaacgcatccagactgtcatagttattggacacaaaggcatcgcgaggatcttcacgctcacaaatagtgaccagtcccagaccttgcgggaattcaaccggcacatctttcatactgtgtacggcgatatcggcgcgattttcgaggagcgcgacttccagctcttttacaaataagccttttccgcctactttcgccagcggcgtatcaagaatcacatcgccgcgcgtcaccatcggtaccagttcaacgaccaggcccggatggctcgccatcaacttgtctttgacatagtgtgcctgccagagtgcaagtgggctttggcgtgtggcaattcttaaaacattgtctaacatgcttgttaccgtcattatcatccgtggtccatcctaacatccttgccagagtgatgtcagtgttgtggtgaaacgtagacgcctgcgcaaaccgtaaaatgaggtctggcagtggatcctgacaggcgtttcacgccgttgtaataaggaatttacagagaataaacggtgctacacttgtatgtagcgcatctttctttacggtcaatcagcaaggtgttaaattgatcacgttttagaccattttttcgtcgtgaaactaaaaaaaccaggcgcgaaaagtggtaacggttacctttgacatacgaaatatcccgaatgccgcgtgttaccgttgatgttggcggaatcacagtcatgacgggtagcaaatcaggcgatacgtcttgtacctctatattgagactctgaaacagagactggatgccataaatcaattgcgtgtggatcgcgcgcttgctgctatggggcctgcattccaacaggtctacagtctactgccgacattgttgcactatcaccatccgctaatgccgggttaccttgatggtaacgttcccaaaggcatttgcctttacacgcctgatgaaactcaacgccactacctgaacgagcttgaactgtatcgtggaatgagtgtacaggatccgccgaaaggtgagcttccaattactggtgtatacaccatgggcagcaccagctccgtagggcaaagttgttcctctgacctggatatctgggtctgtcatcaatcctggctcgatagcgaagagcgccaattgctacaacgtaaatgtagcctgctggaaaactgggccgccagcctgggtgtggaagtcagcttcttcctgattgatgaaaaccgcttccgtcataatgaaagcggcagcctggggggcgaagattgtggctccacccagcatatactgctgcttgacgaattttatcgtaccgccgtgcgtctcgccggtaagcgtattctgtggaatatggtgccgtgcgacgaagaagagcattacgacgactatgtgatgacgctttacgcgcagggcgtgctgacgccaaatgaatggctggatctcggtggcttaagcagcctttctgctgaagagtactttggtgccagcctttggcagctctacaagagtatcgattccccatacaaagcggtactgaaaacactgctgctggaagcctattcctgggaatacccgaacccacgtctgctggcgaaagatatcaaacagcgtttgcacgacggcgagattgtaagctttggtctcgatccatactgcatgatgctggagcgtgttactgaatacctgacggcgattgaagattttacccgtctggatttagtacgtcgctgcttctatttaaaagtgtgcgaaaagctcagccgtgaacgcgcctgcgtaggctggcgtcgcgcagtgttgagccagttagtgagcgagtggggttgggacgaagctcgtctggcaatgctcgataaccgcgctaactggaagattgatcaggtgcgtgaggcgcacaacgagttgctcgacgcgatgatgcagagctaccgtaatctgatccgctttgcgcgtcgcaataaccttagcgtctccgccagtccgcaggatatcggcgtgctgacgcgtaagctgtatgccgcgtttgaagcattaccaggtaaagtgacgctggtaaacccgcagattagtcccgatctcagcgaaccgaatctgacctttatttatgtgccgccgggccgggctaaccgtagtggttggtatctgtataaccgcgcgccaaatattgagagcatcatcagccatcagccgctggaatataaccgttacctgaataaactggtggcgtgggcatggtttaacggcctgctgaccagccgcacccgtttgtatattaaaggtaacggcattgtcgatttgcctaagttgcaggagatggtcgccgacgtgagccaccatttcccgctgcgcttacctgcaccgacaccgaaggcgctctacagcccgtgtgagatccgccatctggcgattatcgttaacctggaatatgacccgacagcggcgttccgcaatcaggtggtgcatttcgatttccgtaagctggatgtcttcagctttggcgagaatcaaaattgcctggtaggtagcgttgacctgctgtaccgcaacagctggaacgaagtgcgtacgctgcacttcaacggcgagcaaagcatgatcgaagccctgaaaactattctcggcaaaatgcatcaggacgccgcaccgccagatagcgtggaagtcttctgttatagccagcatctgcgcggcttaattcgtactcgcgtgcagcaactggtttctgagtgtattgaattgcgtctttccagcacccgccaggaaaccgggcgtttcaaggcgctgcgcgtttctggtcaaacctgggggttgttcttcgaacgcctgaatgtaagcgtacagaaactggaaaacgccatcgagttttatggcgcgattagccataacaaactgcacggcctgagtgtgcaggttgaaaccaatcacgtcaaattaccggcggtggtggacggctttgccagcgaagggatcatccagttctttttcgaagaaacgcaagacgagaatggctttaatatctacattctcgacgaaagcaaccgggttgaggtatatcaccactgcgaaggcagcaaagaggagctggtacgtgacgtcagtcgcttctacagcagtagccatgaccgttttacctacggcagtagcttcatcaacttcaacctgccgcagttctatcagattgtgaaggttgatggtcgtgaacaggtgattccgttccgcacaaaatctatcggtaacatgccgcctgccaatcaggatcacgatacgccgctattacagcaatattttagctgatgaacgtgccggaaagcgaggcttatccggcatgcaatcttagcggaaactgactgtttcacccgcctgctgcgtcgccgcctgttccagcaaatcccagaaggtttcgccgctgcgatcacaaatccactcatcgcctttcaggtcaaaatggtagccgccctgtttggttgccagccatacctggtgcagcggctcctggcggttgataatgattttgctgccattctcaaaggtaatggtcagtacgccgccgttgatttcgcagtcgatatcgctgtcgccatcccagtcgtccaggcgttcttcaatggtcagccagagttgatcagccaggcgatgaaattcactgtcgttcattgttgtatcctgtttttaagtgatggcggcagtatagcggcatggggtcagggcttcaaagtttgcacctctgcggctgcgttccggcacgatagttccgtcaccggaataatgatgtctctgtgtagcgaaagatttgtctctagtttagggcgcagttacaccacgtctttccctgtttctggtaaacattatgatcaggtttaccgagcgagcatcctcacgctgacggaactaaaaaagacaacaaacaaaccacattgcgatagtgcataaagccatcctggcgcgaggtgccgatcacgaaactaccagcaaaacataaatccccacgagtaagcgttatactcgcagcatttcctcacttttcagacttcataaagagtcgctaaacgcttgcttttacgtcttctcctgcgatgatagaaagcagaaagcgatgaactttacaggcaatccataatgaaaaacgtgtttaaggcactcactgtattacttactctcttcagcctgacgggctgcggtctgaaaggtccgctctatttcccgcctgcagataaaaacgcaccgccgccgaccaaaccggtagagacgcaaacgcaatccacggtgccggataaaaacgatcgcgccactggcgatggtccatcccaggtgaattactaaaagtcagtttctgtacccgcgtgattggagtaaatgatgcagttcagcaaaatgcatggccttggcaacgattttatggtcgtcgacgcggtaacgcagaatgtcttttttagtccggagctgattcgtcgcctggctgatcggcacctgggggtagggtttgaccaactgctggtggttgagccgccgtatgatcctgaactggattttcactatcgcattttcaatgctgatggcagtgaagtggcgcagtgcggcaacggtgcgcgctgctttgcccgttttgtgcgtctgaaaggactgaccaataagcgtgatatccgcgtcagcaccgccaacgggcggatggttctgaccgtcaccgatgatgatctggtccgcgtaaatatgggcgaacccaacttcgaaccttccgccgtgccgtttcgcgctaacaaagcggaaaagacctatattatgcgcgccgccgagcagacaatcttatgcggcgtggtgagcatgggaaatccgcattgcgtgattcaggtcgatgatgtcgataccgcggcggtagaaacgcttggtcctgttctggaaagccacgagcgttttccggagcgcgccaatatcggttttatgcaagtggttaagcgcgagcatattcgtttacgcgtttatgagcgtggggcaggagaaacccaggcctgcggcagcggcgcgtgtgcggcggttgcagtagggattcagcaaggtttgctggccgaagaagtacgcgtggaactccccggcggtcgtcttgatatcgcctggaaaggtccgggtcacccgttatatatgactggcccggcggtacatgtctacgacggatttattcatctatgaagcaaccaggggaagaactgcaggaaacactcacggagcttgatgaccgggcggttgtcgattatctgattaaaaatcctgagttttttatccgtaatgcgcgcgcagtagaagcgatacgtgtgccgcatccggtacgcggcaccgttagcttggtcgagtggcacatggcccgcgcacgtaatcatattcatgttctggaagagaacatggcgctgttgatggaacaggctatcgccaacgaaggcctgttttatcgcctactctacctgcagcgcagtctcaccgccgccagcagtctcgacgatatgctgatgcgctttcaccgctgggcgcgcgatctcggcctggcaggtgcgagtctgcgcctgtttccggatcgctggcgcttaggtgcgccgagcaaccacactcatctggcattaagccgtcagtctttcgaaccgctgcgtattcagcgtttggggcaggaacagcactatcttgggccgcttaacggaccagagctgctggtggtgctaccggaagcgaaagcggtgggaagcgtggcgatgagcatgctgggaagcgatgctgatttgggtgtcgtgctgtttaccagtcgcgatgccagtcactatcaacaagggcaaggaacgcagttacttcatgaaattgcgctgatgttgccggagcttctggagcgttggattgaacgcgtatgaccgatttacacaccgatgtagaacgctacctacgttatctgagcgtggagcgccagcttagcccgataaccctgcttaactaccagcgtcagcttgaggcgatcatcaattttgccagcgaaaacggcctgcaaagctggcagcaatgtgatgtgacgatggtgcgcaattttgctgtacgcagtcgccgtaaagggctgggagcagcaagtctggcgttacggctttctgcgctacgtagcttttttgactggctggtcagccagaacgaactcaaagctaacccggcgaaaggtgttagcgcaccgaaagcgccgcgtcatctgccgaaaaacatcgacgtcgacgatatgaatcggctgctggatattgatatcaatgatcccctcgctgtacgcgaccgtgcaatgctggaagtgatgtacggcgcgggtctgcgtctttctgagctggtggggctggatattaaacacctcgacctggagtctggtgaagtgtgggttatggggaaaggcagcaaagagcgccgcctgccgattggtcgcaacgctgtggcgtggattgagcactggcttgatttgcgcgacctgtttggtagcgaagacgacgcgctttttctgagcaaactgggcaagcgtatctccgcgcgtaatgtgcagaaacgctttgccgaatggggcataaaacaagggctgaataatcacgttcatccgcataaattacgtcacagcttcgccacgcatatgctggagagcagcggcgatcttcgtggtgtgcaggagctgctgggtcatgccaacctctccaccacgcaaatctatactcatcttgattttcaacaccttgccagcgtgtacgatgcggcgcatccacgcgccaaacgggggaaataatgcgtttttaccggcctttggggcgcatcagcgcgctcacctttgacctggatgataccctttacgataaccgtccggtgattttgcgcaccgagcgagaggcgcttacctttgtgcaaaattatcatccggcgctgcgcagcttccagaatgaagatctgcaacgcctgcgccaggcggtacgggaagcggaacccgagatttatcacgacgtgacgcgctggcgttttcgtagcattgaacaagcgatgctcgacgccgggctgagtgccgaagaagccagtgcaggcgcacacgcagcaatgatcaactttgccaaatggcgcagccgaatcgacgtcccgcagcaaactcacgacaccttaaaacagctggcgaagaaatggccgctggtggcgatcaccaacggtaacgcccagccggagctgtttggtttgggggattattttgagtttgtgctgcgcgctggcccgcacgggcgcagtaaaccgttcagcgatatgtactttttggctgcggaaaaactcaacgtgccgatcggcgagatcttacatgttggggacgatctcaccactgacgtgggtggggcaattcgcagcggaatgcaggcttgttggatcagaccggaaaatggcgatctgatgcaaacctgggacagccgtttactgccgcatctggaaatttcccggttggcatctctgaccagcctgatataatcagcaaatctgtatatatacccagctttttggcggagggcgttgcgcttctccgcccaacctatttttacgcggcggtgccaatggacgtttcttacctgctcgacagccttaatgacaaacagcgcgaagcggtggccgcgccacgcagcaaccttctggtgctggcgggcgcgggcagtggtaagacgcgcgtactggtgcatcgtatcgcctggttgatgagcgtggaaaactgcagcccatacagcattatggcggtgacgtttaccaacaaagcggcggcggagatgcgtcatcgtatcgggcaactgatgggcacgagccagggcggtatgtgggtcggcaccttccacgggctggcgcaccgtttgctgcgtgcgcaccatatggacgccaatctgccgcaggatttccagatcctcgacagtgaagaccagctacgcctgcttaagcgtctgatcaaagccatgaacctcgacgagaagcagtggccgccgcggcaggcaatgtggtacatcaacagccagaaagatgaaggcctgcgtccgcatcatattcaaagctacggtaatccggtggagcagacctggcagaaggtgtatcaggcgtatcaggaagcgtgtgaccgcgcgggcctggtggacttcgccgagctgctgctgcgcgctcacgagttgtggcttaacaagccgcatatcctgcaacactaccgcgaacgttttaccaatatcctggtggacgaattccaggataccaacaacattcagtacgcgtggatccgcctgctggcgggcgacaccggcaaagtgatgatcgtcggtgatgacgaccagagtatctacggctggcgcggggcgcaggtggagaatattcagcgtttccttaatgatttccccggtgccgaaactattcgtctggagcaaaactaccgctctaccagcaatattctgagcgccgctaacgccctgattgaaaacaataacgggcgtctgggtaaaaaactgtggaccgatggcgcggacggtgagcctatttccctctattgcgcttttaacgaactcgatgaagcgcgttttgtggttaaccgcatcaaaacctggcaggacaacggcggagcgcttgccgagtgcgccattctctaccgcagcaacgcccagagccgggtgctcgaagaggcgttattgcaggccagtatgccgtaccgtatttacggcgggatgcgcttcttcgaacgccaggaaatcaaagatgcgctcagctatctgcgcctgattgccaaccgcaacgacgacgcggcctttgagcgtgtggtgaatacgccaacgcggggtattggtgaccggacgctggacgtggtacgtcagacaagccgcgatcgccagttaacactctggcaggcatgtcgtgagctgttgcaggaaaaagccctcgccgggcgagctgccagcgccttgcagcgatttatggaattaatcgacgccttagcgcaggaaactgccgatatgccgctgcatgtacagactgaccgggtaattaaagactccggcctgcgtaccatgtatgagcaggagaagggcgaaaaaggtcagacgcgtatcgaaaacttagaggaactggtgacggcaacgcgccagttcagctacaacgaagaagacgaagatttaatgccgctgcaggcgttcctctcccatgcggcactggaagcaggtgaagggcaggcggatacctggcaggatgcggtgcagttgatgacgctacacagcgcgaaaggcctggagttcccgcaggtgtttatcgttggtatggaagagggcatgttcccaagccagatgagcctggatgaaggcgggcgtctggaagaagaacgccgtctggcctacgttggcgtaacccgcgcgatgcagaaactgacgctgacctacgcggaaacccgccgtctgtatggtaaagaggtttaccatcgcccgagccgctttatcggcgagctgccggaagagtgtgtggaagaggtgcgcctgcgcgccacggtaagccgcccggtcagccatcagcggatgggtacgccgatggtcgagaacgacagcggctacaagctcggccagcgcgtacgccacgctaagtttggtgaaggcaccattgtcaatatggaaggcagcggtgagcatagccgtttgcaggtggcatttcagggccagggtattaaatggctggtggcggcatacgcccggctggagagcgtgtaacgttgccggatgcggtgctgcgcaccttatttggcctaaaaaatcattcagattcaataaattgcaacgtcatgtaggccggatagggcgtttacgccgcatccggcatctgcgccatcttcagtatctgacacaaaactatcgttttaacctttccgctcgacggaaatcatggtgacaaaaggatagcgttgccacgggattgccccgcctttcatatacatatgactaatcgtgccatcaagataaagcagctgctcaacgttcagtttcgctttggcataacaggcaaaatcataaaaatttgttgcctgctggctcaacaaaaacacggcgttcccatgtttattaatcccaacaccgttacgaattttgctactggcgacgttgggatgaatacgcggattaattacaccgttttccatcaacattggcccactctgcaccgcaaactgaatctctttactggttttgaaggcatccagacgaacgatgccgactttatctcccgcgacataaaacacgccgccaggacggataaagaaattcccttcaccactagcgagatttaacgccaccttctgctgaccgttttcgatgtacaaaccgagcggcgcatagctttcatcatagatgccgccgttcatcgccatctgcacctgaccctgactattaatatccgccagcagagcatgtaacgttccccacgcttcgccattggctttttgccagtacattttcacccgctctgtttgaggattaacggtatacgcctgtacggtcagcgtcggatcactgagtgcgcaatcatcagcggcaacagcaaacaagggaggtaaggtgagggcgagaaaaatccgtttgagattcaaggtgatcattcctttaccaatgagtagctgatgcgccattataggtcctggatgtgggatttttttatcctgttagcgaccttgacgagtaccaaaaagcgcgaagttcaactattgttctgtggtgttctgttgcgtgttgacggcaaaattttgctggcgtaacatgcgcgcacgatcactctaagaggacattcgccttggacacacccagtagatactggctcactatcctgtcatccaggatcaactcctaaggctatccctttttgctgatagccttagcggttgtcagcgacctcaatttttcccgtcgcgctgagtcaggctgtttaatggtctgaaacccaatttgtttctgtgtgcccaccgaactgtccgatattttaagcattgggagtcccggtcatgctgagcgcatttcaactggaaaataaccgactgacccggctggaagtcgaagagagtcaaccccttgtaaatgcagtatggattgatcttgtcgaaccggacgacgacgagcgactgcgcgtacaatctgaacttggccagagcctggcaacccgcccggaactggaagacatcgaagcaagcgcacgtttctttgaagacgacgacggcctgcatattcactccttcttcttctttgaagatgcggaagatcacgccggtaactccactgtggcatttaccatccgtgatggtcgtctgtttactctgcgtgagcgtgaactgcccgcttttcgtctgtatcgtatgcgtgcccgtagccagagcatggtagacggtaacgcctacgagttgctgctggatctgttcgaaaccaaaatcgaacagttggcagatgaaattgaaaatatctatagcgacctggagcagttgagccgggtgattatggaagggcatcagggcgatgagtacgacgaggcgctctccactctggcggaactggaagatatcggctggaaagttcgcctgtgtctgatggatacccagcgcgcgctcaacttcctggtgcgtaaagcgcgtttaccgggtgggcaactggagcaggcgcgtgaaatcctgcgagatatcgaatccctgctgccgcataacgaatccctgttccagaaggtgaacttcctgatgcaggcggcaatgggttttatcaacatcgagcagaaccgcatcatcaaaatcttcagcgtggtatccgtggtattcctgccgccgacgctcgttgcttccagctatggcatgaactttgagtttatgccagaactgaagtggagcttcggctaccctggcgcgattatctttatgatcctcgcgggcctggcaccgtatctgtactttaagcggaagaactggttgtaaaaaacgagagcggtggcttagtctggctaagccacctgttattcaaaggctccaggtatttaacccttttacctctttctcatagaaccatttgttcgtgttaacagcaacataggctgctacggcaattcccagaatgttaacgccaattagtgcaccaacaaatagagatagaataccaagtaatagaactataattgcttttttccataaccccaggacaaataaatatatccaggaacagaagaaagcaatgaaattcatttgaatagttaagcgttgtcttacttttaatgctttaaatgctgctttatattctggtgttgccccccagaatccaggaaaaccatgttgatcataaaaattaaatcggtatttccatttttcacttaaactaccatcgttcatatattccttactcataaatactccataattattgtttactactatcagtaggtgcaagcattagcatactgaaagtggaaaaataacaaatcaaaaaaatcatgctaccattgccactacaggcaaaatcttcggctatcattgtgatgatagagatgatatatactgctaatgtaccaaaaacataagtttttatatagatgaaaccactatcacggagtcgctggcaattcatgttgatgacgagataatggagtacgatggtagagactataacaagaaagcctgcttctccatcgttaaaaaagataataagaaaggcaaaaatgaaatttattaaaataaaactaaatatataacgacgtctggaaatcttaccgttagatgttgggataaatatacgtaacataaattttacatccttgtatgagtctccggtcagcatggcaatatgcccactctcatgcaagagtcggcatattttttcagaatatatttattttttatttggacgttctacgctgcgtataaatcgcatccatcacaaaaattgccagcgccacccaaataaaggcgaaagtcaccatcttatcggcacccggtttttcaccataaaacgtcacagccagcaggaacatcagcgtcgggccaatgtactggaaaaagcctaacgtactgagacgcaagcgcgtggcagcggcggtaaaacacaacagcggtacggtagtgacaataccggcggcgatcagcagtaaattcaggctcatcgggttttgccccatatggctggtactgctgtcggcaatagcaaacaggtaaattgccgccacgggcagcagccacatggtttcgattaacatgccggtttgcgcttcaacggcaatcttcttgcgtaccagaccgtagaaggcaaaactaaatgccagtcccagcgcgataataggtaggctaccaaaagtccacagctggactaacacgccacatatcgccagaatcaccgccagccattgcatccggcggaatcgctcgccgaggaaaatcatccccagcacaatgttcaccagcgggttaataaagtaaccaaggctcgcttccagcatatggtgattgttcaccgcccagataaacagtagccagttgccaccaatcagcacggcagagactgccagcataaaaattttctgtggcgtctgaatcagcgtttttaaataggaccactggcggcaaatgctcatcagcaccaccataaagaaaaagctccagatcacgcgatgcgtcaggatttcatcggcgggcacgtagtaaatcaacttgaagtacgctggcgctataccccaaataaaataagcggcaagagcgagtaatacgccctgccgcgtttgttttgcatccatcgggaatactcatttttaattggtaacagcagtttacctgcttttatgtcttcaacctaccatataggtggcggtggcactggcaatataaagctgttcttcattgtgtaattcaacgcgggcgacggcgactttattgcctgcacgcaacaggctactagtagcagtaaaacgctcgcccctgcctgggcgcagataatcaacgcgaagatcaatggtccccatccggcttagccgctggcgtagttcatcttcactgatggtttcgtggcgggttaaggtacttcccacgcacaccagaccggcggcgacatccagcgcgctcgcaatgaccccgccgtgcaaaatgctttgcgcccagttgcccaccatcattggctgatttttaaaggccagctgtgcgaactctttttcgtaacgctccagttccatccccaatgcgcggttaaatggcatgtgataaacaaacatctcacccactaatttcagggcttgttcagcggtcagtacggcagacatatcatccttacacttcattggttaatgaaatgttgattttatgcttctttgttgttggtttctactttaggaagggataactaacggctatggagttaagtatgtaaaatagcccgcagaaaaatattcaccttatcaataattcgttacggagaacacgaccgatgcggactctgcagggctggttgttgccggtgtttatgttgcctatggcagtatatgcacaagaggcaacggtgaaagaggtgcatgacgcgccagcggtgcgtggcagtattatcgccaatatgctgcaggagcatgacaatccgttcacgctctatccttatgacaccaactacctcatttacacccaaaccagcgatctgaataaagaagcgattgccagttacgactgggcggaaaatgcgcgtaaggatgaagtaaagtttcagttgagcctggcatttccgctgtggcgtgggattttaggcccgaacagcgtgttgggtgcgtcttatacgcaaaaatcctggtggcaactgtccaatagcgaagagtctagtccgtttcgtgaaaccaactacgaaccgcaattgttcctcggttttgccaccgattaccgttttgcaggttggacgctgcgcgatgtggagatggggtataaccacgactctaacgggcgttccgacccgacctcccgcagctggaaccgcctttatactcgcctgatggcagaaaacggtaactggctggtagaagtgaagccgtggtatgtggtgggtaatactgacgataacccggatatcaccaaatatatgggttactaccagcttaaaatcggctatcacctcggtgatgcggtgctcagtgcgaaaggacagtacaactggaacaccggctacggcggcgcggagttaggcttaagttacccgatcaccaaacatgtgcgcctttatactcaggtttacagcggctatggcgaaagcctcatcgactataacttcaaccagacccgtgtcggtgtgggggttatgctaaacgatttgttttgatgaacggttgagtggttggcaaatctggaatccagcatccaggattaccctctcagagactaaaagcattgcagtttctcgcgcaggcgctgaaaatagcgcctgtttttatttcaggcaatcggggtgaatgtggcgcaggcggaagtgttgaatctggagtccggagctaaacaggttttacaagaaacctttggctaccaacagtttcgccccggccaggaagaaattatcgacactgtgctttccggccgcgattgcctcgtcgtcatgcccactggtggcggaaaatccctttgctatcaaatccctgccttattgctaaacggccttaccgtggttgttagtccgctgattagcttgatgaaagatcaggtggatcaactgcaagccaacggcgtggcggcggcgtgccttaacagcacgcaaacccgcgaacagcaacttgaagtgatgacaggctgccgcaccgggcaaattcgtctgctttatatcgccccggaacgcctgatgctggataactttcttgagcatctggcgcactggaatccggtgttattagccgttgatgaagcgcactgtatctcccaatggggccacgatttccgcccggaatatgccgcgctcggtcagttgcgccagcggttcccgacgctgccgtttatggcgctgaccgccacagccgacgacaccacgcgccaggatatcgtgcgcctgctggggctgaacgatccgctgattcaaatcagcagttttgaccgtccgaatattcgctacatgctgatggagaagttcaaaccgctcgatcagttgatgcgctacgtgcaggaacagcgcggtaagagtggcattatctactgcaacagccgcgcgaaagtagaagacaccgctgcgcgcctgcaaagcaagggaattagcgcggcggcctatcatgccgggctggaaaataatgttcgcgccgatgtgcaggaaaaattccagcgcgatgacctgcaaattgtggtggcgacggtggcgttcggcatgggcatcaataaaccaaacgttcgcttcgtggtccactttgatattccgcgcaatatcgaatcctattatcaggaaaccggacgcgccgggcgtgatggcctgcccgcggaagcgatgctgttttacgatccggctgatatggcgtggctgcgccgttgtctggaagagaagccgcaggggcagttgcaggatatcgagcgccacaaactcaatgcgatgggcgcgtttgccgaagcgcaaacttgccgtcgtctggtattgctgaactattttggcgaagggcgtcaggagccgtgcgggaactgcgatatctgcctcgatccgccgaaacagtacgacggtagtaccgatgctcagattgccctttccaccattggtcgtgtgaatcagcggtttgggatgggttatgtggtggaagtgattcgtggtgctaataaccagcgtatccgcgactatggtcatgacaaactgaaagtctatggcatgggccgtgataaaagccatgaacattgggtgagcgtgatccgccagctgattcacctcggcctggtgacgcaaaatattgcccagcattctgccctacaactgacagaggccgcgcgcccggtgctgcgcggcgaatcctctttgcaacttgccgtgccgcgtatcgtggcgctcaaaccgaaagcgatgcagaaaagcttcggcggcaactatgatcgcaaactgttcgccaaattacgcaaactgcgtaaaagcatagccgatgaaagtaatgtcccgccgtacgtggtgtttaacgacgcaaccttgattgagatggctgaacagatgccgatcaccgccagcgaaatgctcagcgttaacggcgttgggatgcgcaagctggaacgctttggcaaaccgtttatggcgctgattcgtgcgcatgttgatggcgatgacgaagagtaatcagcagcataaaaaagtgccagtatgaagactccgtaaacgtttcccccgcgagtcaaatgtatgttgatgttatttctcaccgtcgccatggtgcacattgtggcgcttatgagccccggtcccgatttcttttttgtctctcagaccgctgtcagtcgttcccgtaaagaagcgatgatgggcgtgctgggcattacctgcggcgtaatggtttgggctgggattgcgctgcttggcctgcatttgattatcgaaaaaatggcctggctgcatacgctgattatggtgggcggtggcctgtatctctgctggatgggttaccagatgctacgtggtgcactgaaaaaagaggcggtttctgcacctgcgccacaggtcgagctggcgaaaagtgggcgcagtttcctgaaaggtttactgaccaatctcgctaatccgaaagcgattatctactttggcagcgtgttcagtttgtttgtcggtgataacgttggcactaccgcgcgctggggcatttttgcgctgatcattgtcgaaacgctggcgtggtttaccgtcgttgccagcctgtttgccctgccgcaaatgcgccgtggttatcaacgtctggcgaagtggattgatggttttgccggggcgttatttgccggatttggcattcatttgattattagccggtgatgccagacgcgtcttcagagtaagtcggataaggcgtttacgccgcatccgacattatttttcacgcatgcctcgcgcttgctaacagcgctcccaccagcataaacaagctgccgaaaatcttattcagcgccttcatctgctttggtcctttaatccatagagcaatccgttgagcaagggtggcgtaaccgatcatcacaataatatcgaccacaatagtggtgacgccgagcacgatatactgcatcagttgcggctgttgcggcatgatgaattgcggaaatagcgccgccagaaacacaatacttttgggattggtgagattcacaaaaactgcgcgctggaacaaatgtcgacggctttgagtagaggccaggcttttaaggtcaattgcaccagcggcgcgccactgctggattcccagccaaatcaagtaagccgcgcctgcccacttcaacacttcaaacgcaatcacactgcgggaaaatagcgtccccaaccccacgccaaccagcacaatatgaatcgccagtccggtctgaagcccagcaatagacgccaccgcgccgcgataaccgtggttgaggctggtggtcatagtgttgattgcaccagagcctgggctcaggcttaaaatgatgcttgtcagcaggtaggcaaaccaccattctaaggtcatgatgaactcccggtgtgtctatttttgtgccacaatacgctactgtcgcagcgttgtgtcaggcacgctaaaaaaaacgattttacgtggtttaagaggcagattacccgatgtttcagcagcaaaaagactgggaaacaagagaaaacgcgtttgctgcttttaccatgggaccgctgactgatttctggcgtcagcgtgatgaagcagagtttactggtgtggatgacattccggtgcgctttgtccgttttcgcgcacagcaccatgaccgggtggtagtcatctgcccggggcgtattgagagctacgtaaaatatgcggaactggcctatgacctgttccatttggggtttgatgtcttaatcatcgaccatcgcgggcagggacgttccggtcgcctgttagccgatccgcatctcgggcatgttaatcgctttaatgattatgttgatgatctggcggcattctggcagcaggaggttcagcccggtccgtggcgtaaacgctatatactggcacatagcatgggcggtgcgatctccacattatttctgcaacgccatccaggtgtatgtgacgccattgcgctaactgcgccaatgtttgggatcgtgattcgtatgccgagttttatggcacggcagatcctcaactgggccgaagcgcatccacgtttccgtgatggctatgcaataggcaccgggcgctggcgcgcgttgccgtttgctatcaacgtactgacccacagcagacagcgatatcgacgtaacttacgcttctatgctgatgacccaacgattcgcgtcggtgggccgacctaccattgggtacgcgaaagtattctggctggcgaacaggtgttagccggtgcgggtgatgacgccacgccaacgcttctcttgcaggctgaagaggaacgcgtggtggataaccgcatgcatgaccgtttttgtgaactccgcaccgccgcgggccatcctgtcgaaggaggacggccgttggtaattaaaggtgcttaccatgagatcctttttgaaaaggacgcaatgcgcagtgtcgcgctccacgccatcgttgattttttcaacaggcataacagtcccagcggaaaccgctctacagaggtttaaatttcttatgtaccaggttgttgcgtctgatttagatggcacgttactttctcccgaccatacgttatccccttacgccaaagaaactctgaagctgctcaccgcgcgcggcatcaactttgtgtttgcgaccggtcgtcaccacgttgatgtggggcaaattcgcgataatctggagattaagtcttacatgattacctccaatggtgcgcgcgttcacgatctggatggtaatctgatttttgctcataacctggatcgcgacattgccagcgatctgtttggcgtagtcaacgacaatccggacatcattactaacgtttatcgcgacgacgaatggtttatgaatcgccatcgcccggaagagatgcgcttttttaaagaagcggtgttccaatatgcgctgtatgagcctggattactggagccggaaggcgtcagcaaagtgttcttcacctgcgattcccatgaacaactgctgccgctggagcaggcgattaacgctcgttggggcgatcgcgtcaacgtcagtttctctaccttaacctgtctggaagtgatggcgggcggcgttagtaaaggccatgcgctggaagcggtggcgaagaaactgggctacagcctgaaggattgtattgcgtttggtgacgggatgaacgacgccgaaatgctgagcatggcggggaaaggctgcattatgggcagtgcgcaccagcgtctgaaagaccttcatcccgagctggaagtgattggtactaatgccgacgacgcggtgccgcattatctgcgtaaactctatttaagctaatcgttctttatttggtcagttgtcaacctgatacttcgctacaatggatacccgttaatcaaagagttttccattgtggcgctacttatcatcaccacgattctgtgggccttctcctttagcttttatggcgagtaccttgcggggcacgtcgatagctattttgcggtgctggtgcgcgttggcctggcggcactcgtttttctgccgtttctgcgtacccgtggcaatagcctgaaaacggtcggcctgtatatgctggtgggcgcgatgcagcttggcgtgatgtatatgctgagtttccgcgcttatctctacctgacggtttccgagctgctgctgttcaccgtgctgacgccgctctacatcacgctgatttatgacatcatgagtaagcgccgtctgcgctggggctatgcctttagcgccttgctggcggtgattggtgccgggattattcgctatgatcaggtcaccgaccatttctggactggcttgctgctggtgcaactctccaatatcacttttgccattggcatggtgggttacaaacgcctgatggaaactcgcccgatgccacagcataacgcctttgcgtggttctatcttggcgcgtttctggtggcagtgattgcatggttcttgctgggaaatgcgcagaaaatgccgcaaaccacgctgcaatggggcattctggtgtttcttggcgtggtggcttccgggattggctactttatgtggaactacggcgcgacgcaggtggacgccggaacgctgggcattatgaataatatgcacgttccggcagggctgctggtaaacctggctatctggcaccaacagccgcactggccaacgtttattacaggcgcgctggtgatcctggccagtctgtgggtgcatcgtaagtgggtcgctccgcgctctagtcaaacggcagatgatcgcaggcgtgattgcgcgctgagcgaataattacaggcgcgctggacttcctggcctcactgtgggtgcatcgtaagtgggtcgctccgcgctcttcacaaacggcagatgatcgcaggcgtgattgcgcgcactgcgaataaacgcttccgtaactggctgacgctgctcgccatcgcgcacggcggcgtacagtcggctccacaagccttcgcccagggttttggtcaccaccagaccctggcgctcaaaactctctactacccaatgcggtagcgcggcaatacccatccgcgcggcaaccatctgaatcaacaataaggtgttatcgacgcttttcagactcgggctgacgcctgccggctgaagaaaatgccgccagacatccagtcgactacgctgcaccggataaattaatagcgtctcgctggcgagatcttccggtgtaattcgcgttttcgccgccagtggatggtcaggtgctaacaccagacgcacttcatagtcgaacatcgggctataatgcaggccactgcgcggcagaatatcggacgtcattaccagatccagctctccctgttgcaaggcgggctgcgggtcaaatgtcacgccgcttttaaaatccatctctacctgcggccagttcttatggaaattttctaacgcgggtgtcagccactgaatacagctatggcactcaatggcaatgcgcagacgcgtctgctgcggttcattgcaggcttgcagggcctggctaatttgcggcagtacctggtttgccagttgcaacaggatttctccctgcggtgtaaagcgtagcggctggctcttacgcacaaatagccggaagccaaggcgttgttccagatcgctaaactggtgagacagggcggattgcgtctgatgcaacgtcgccgcagcggctgcgaggctgccgcagttccgcaacgcttgtagcgttttcaggtgttttacttcgatcatgaaagtccttcacttcggcatgaataatttgcgcttgaggaatatacagtaaccgccaattatggatgtgtaaacatctggacggctaaaatccttcgtcttttaaatttatggtgcgttggctgcgtttctccaccccggtcacttacttcagtaagctcccggggatgaataaacttgccgccttccctaaattcaaaatccataggatttacatataattagaggaagaaaaaatgacaatattgaatcacaccctcggtttccctcgcgttggcctgcgtcgcgagctgaaaaaagcgcaagaaagttattgggcggggaactccacgcgtgaagaactgctggcggtagggcgtgaattgcgtgctcgtcactgggatcaacaaaagcaagcgggtatcgacctgctgccggtgggcgattttgcctggtacgatcatgtactgaccaccagtctgctgctgggtaacgttccggcgcgtcatcagaacaaagatggtagcgtagatatcgacaccctgttccgtattggtcgtggacgtgcgccgactggcgaacctgcggcggcagcggaaatgaccaaatggtttaacaccaactatcactacatggtgccggagttcgttaaaggccaacagttcaaactgacctggacgcagctgctggacgaagtggacgaggcgctggcgctgggccacaaggtgaaacctgtgctgctggggccggttacctggctgtggctggggaaagtgaaaggtgaacaatttgaccgcctgagcctgctgaacgacattctgccggtttatcagcaagtgctggcagaactggcgaaacgcggcatcgagtgggtacagattgatgaacccgcgctggtactggaactaccacaggcgtggctggacgcatacaaacccgcttacgacgcgctccagggacaggtgaaactgctgctgaccacctattttgaaggcgtaacgccaaatctcgacacgattactgcgctgcctgttcagggtctgcatgttgacctcgtacatggtaaagatgacgttgctgaactgcacaagcgcctgccttctgactggttgctgtctgcgggtctgatcaatggtcgtaacgtctggcgcgccgatcttaccgagaaatatgcgcaaattaaggacattgtcggcaaacgtgatttgtgggtggcatcttcctgcagcttgctgcacagccccatcgacctgagcgtggaaacgcgtcttgatgcagaagtgaaaagctggtttgccttcgccctacaaaaatgccatgaactggcactgctgcgcgatgcgctgaacagtggtgacacggcagctctggcagagtggagcgccccgattcaggcacgtcgtcactctacccgcgtacataatccggcggtagaaaagcgtctggcggcgatcaccgcccaggacagccagcgtgcgaatgtctatgaagtgcgtgctgaagcccagcgtgcgcgttttaaactgccagcgtggccgaccaccacgattggttccttcccgcaaaccacggaaattcgtaccctgcgtctggatttcaaaaagggcaatctcgacgccaacaactaccgcacgggcattgcggaacatatcaagcaggccattgttgagcaggaacgtttgggactggatgtgctggtacatggcgaggccgagcgtaatgacatggtggaatactttggcgagcacctcgacggatttgtctttacgcaaaacggttgggtacagagctacggttcccgctgcgtgaagccaccgattgtcattggtgacattagccgcccggcaccgattaccgtggagtgggcgaagtatgcgcaaagcctgaccgacaaaccggtgaaagggatgctgacggggccggtgaccatactctgctggagcttcccgcgtgaagatgtcagccgtgaaaccatcgccaaacagattgcgctggcgctgcgtgatgaagtggccgatctggaagccgctggaattggcatcatccagattgacgaaccggcgctgcgcgaaggtttaccgctgcgtcgtagcgactgggatgcgtatctccagtggggcgtagaggccttccgtatcaacgccgccgtggcgaaagatgacacacaaatccacactcacatgtgttattgcgagttcaacgacatcatggatagcattgcggcgctggacgcagacgtcatcaccatcgaaaccagccgttccgacatggagttgctggagagctttgaagagtttgattatccaaatgaaatcggtcctggcgtctatgacattcacagcccaaacgtaccgagcgtggaatggattgaagccttgctgaagaaagcggcaaaacgcattccggcagagcgcctgtgggtcaacccggactgtggcctgaaaacgcgcggctggccagaaacccgcgcggcactggcgaacatggtgcaggcggcgcagaacttgcgtcgggggtaaaatccaaaccgggtggtaataccacccggtcttttctcattacaggctcttcttcccaccatactgcttaaaccattccagcatacgctgccagccatcttctgcagatgcggcatgatagctcgggcgataatcagcgttgaatgcatgcccggcgtccgggtacacgataatctctgctttcgcattagcagcccgcagcgcctggcgcatggtttcaacgctctcctgcggaatgctgttatcctgaccaccatataagccgagaatcggcgcgttaagatcggttgcgatatcaacaggttgtttcggactattcaggctcttgtcgcccgtcagtttgccgtaccacgccactgcggcttttagctgtggattatgcgcggcatacagccaggtgatacgtccaccccagcagaatccggtgatcattaaacgatgaacatcgccgccgttgcgggaagcccaactggcgacatgatcgagatcggccagcacctggctgtcaggcacttttgctaccagaccgctaagcaacgtggggatatcggcaaaatcattcggatcgccttcgcggaagtaaagttcaggtgcgatagccagatacccctccagcgccagacggcgacaaatgtcgcggatatgttcatgcacgccaaaaatttcctgcactacaatgaccactggcagtgggccatcgctttgctttggtctggcatggtaagcaggcatgttatccccttgactagggatagaggtgaagcccgccacaatcgcgtcgtccggggtctgaacgatggtgctagcgagagggcttgcagcaggtgcaaatccagattgttgtgttgttgccatggtattctccgtacccttataaaaatgttgcgcaatgttaactatagtcagcatgcaacaaatcacattgcctgaatcggctcatcttttatgcagtcctgcagaatgaagggtgatttatgtgatttgcatcacttttggtgggtaaatttatgcaacgcatttgcgtcatggtgatgagtatcacgaaaaaatgttaaacccttcggtaaagtgtctttttgcttcttctgactaaaccgattcacagaggagttgtatatgtccaagtctgatgtttttcatctcggcctcactaaaaacgatttacaaggggctacgcttgccatcgtccctggcgacccggatcgtgtggaaaagatcgccgcgctgatggataagccggttaagctggcatctcaccgcgaattcactacctggcgtgcagagctggatggtaaacctgttatcgtctgctctaccggtatcggcggcccgtctacctctattgctgttgaagagctggcacagctgggcattcgcaccttcctgcgtatcggtacaacgggcgctattcagccgcatattaatgtgggtgatgtcctggttaccacggcgtctgtccgtctggatggcgcgagcctgcacttcgcaccgctggaattcccggctgtcgctgatttcgaatgtacgactgcgctggttgaagctgcgaaatccattggcgcgacaactcacgttggcgtgacagcttcttctgataccttctacccaggtcaggaacgttacgatacttactctggtcgcgtagttcgtcactttaaaggttctatggaagagtggcaggcgatgggcgtaatgaactatgaaatggaatctgcaaccctgctgaccatgtgtgcaagtcagggcctgcgtgccggtatggtagcgggtgttatcgttaaccgcacccagcaagagatcccgaatgctgagacgatgaaacaaaccgaaagccatgcggtgaaaatcgtggtggaagcggcgcgtcgtctgctgtaattctcttctcctgtctgaaggccgacgcgttcggccttttgtatttttgcgtagcgcctcgcaggaaatgcctttccaactggacgtttgtacagcacaattctattttgtgcgggtaagttgttgcgtcaggaggcgttgtggatttcagtatcatggtttacgcagttattgcgttggtgggtgtggcaattggctggctgtttgccagttatcaacatgcgcagcaaaaagccgagcaattagctgaacgtgaagagatggtcgcggagttaagcgcggcaaaacaacaaattacccaaagcgagcactggcgtgcagagtgcgagttactcaataacgaagtgcgcagcctgcaaagtattaacacctctctggaggccgatctgcgtgaagtaaccacgcggatggaagccgcacagcaacatgctgacgataaaattcgccagatgattaacagcgagcagcgcctcagtgagcagtttgaaaacctcgccaaccgtatttttgagcacagcaatcgccgggttgatgagcaaaaccgtcagagtctgaacagcctgttgagcccgctacgtgaacaactggacggtttccgccgtcaggttcaggacagcttcggtaaagaagcacaagaacgccataccctgacccacgaaattcgcaatctccagcaactcaacgcgcaaatggcccaggaagcgatcaacctgacgcgcgcgctgaaaggcgacaataaaacccagggcaactggggcgaggtagtattgacgcgggtgttggaggcttccggtctgcgtgaagggtatgaatatgaaacccaggtcagcatcgaaaatgacgcccgcagccggatgcagccggatgtcatcgtgcgcctgccgcagggaaaagatgtggtgatcgacgccaaaatgacgctggtcgcctatgaacgctattttaacgccgaagacgactatacccgcgaaagcgcgctacaggaacatatcgcgagcgtgcgtaaccatatccgtttgctgggacgcaaagattatcaacagctgccggggctgcgaactctggattacgtgctgatgtttattcccgttgaacccgcttttttactggcgcttgaccgccagccggagctgatcaccgaagcgttgaaaaacaacatcatgctggttagcccgactacgctgctggtggcgctgcgcactatcgccaacctgtggcgttatgagcatcaaagccgcaacgcccagcaaatcgccgatcgtgccagcaagctgtacgacaagatgcgtttgttcatcgatgacatgtccgcgattggtcaaagtctcgacaaagcgcaggataattatcggcaggcaatgaaaaaactctctagtgggcgcggaaatgtgctggcgcaggcagaagcgtttcgcggtttaggagtagaaattaaacgcgagattaatccggatttggctgaacaggcggtgagccaggatgaagagtatcgacttcggagcgttccggagcagccgaatgatgaagcttatcaacgcgatgatgaatataatcagcagagccgctaacccattgggagtagttaagccgggtagaaatctagggcatcgacgcccaatctgttacacttctggaacaattttttgatgagcaggcattgagatggtggataagagtcaagaaacgacgcactttggttttcagaccgtcgcgaaggaacaaaaagcggatatggtcgcccacgttttccattccgtggcaagtaaatacgatgtcatgaatgatttgatgagttttggtattcatcgtttgtggaagcgattcacgattgattgcagcggcgtacgccgtgggcagaccgtgctggatctggctggtggcaccggcgacctgacagcgaaattctcccgcctggtcggagaaactggcaaagtggtccttgctgatatcaatgaatccatgctcaaaatgggccgcgagaagctgcgtaatatcggtgtgattggcaacgttgagtatgttcaggcgaacgctgaggcgctgccgttcccggataacacctttgattgcatcaccattagctttggtctgcgtaacgtcaccgacaaagataaagcactgcgtagtatgtatcgcgtgctgaaacccggcggccgcctgctggtgcttgagttcagcaagccaattatcgagccgctgagcaaagcctatgatgcatactccttccatgtgctgccgcgtattggcagtctggtcgcgaacgacgccgacagctaccgttatctggcagaatccatccgtatgcatcccgatcaggataccctgaaagccatgatgcaggatgccggattcgaaagtgtcgactactacaatctgacggcaggggttgtggcgctgcatcgtggttataagttctgacaggagaccggaaatgccttttaaacctttagtgacggcaggaattgaaagtctgctcaacaccttcctgtatcgcagtcccgcgctgaaaacggcccgcagccgtctgctgggtaaagtattgcgcgtggaggtaaaaggctttagcacgagtttgattctggtgttcagcgaacgccaggttgatgtactgggcgaatgggcaggcgatgctgactgcaccgttatcgcctacgccagtgtgttgccgaaacttcgcgatcgccagcagcttaccgcactgattcgcagtggtgagctggaagtgcagggcgatattcaggtggtgcaaaacttcgttgcgctggcagatctggcagagttcgaccctgcggaactgctggccccttataccggtgatatcgccgctgaaggaatcagcaaagccatgcgcggaggcgcaaagttcctgcatcacggcattaagcgccagcaacgttatgtggcggaagccattactgaagagtggcgtatggcacccggtccgcttgaagtggcctggtttgcggaagagacggctgccgtcgagcgtgctgttgatgccctgaccaaacggctggaaaaactggaggctaaatgacgccaggtgaagtacggcgcctatatttcatcattcgcacttttttaagctacggacttgatgaactgatccccaaaatgcgtatcaccctgccgctacggctatggcgatacagtttattctggatgccaaatcggcataaagacaaacttttaggtgagcgactacgactggccctgcaagaactggggccggtttggatcaagttcgggcaaatgttaagtacccgccgcgatctttttccaccgcatattgccgatcagctggcgttattgcaggacaaagttgctccgtttgatggcaagctggcgaagcagcagattgaagctgcaatgggcggcttgccggtagaagcgtggtttgacgattttgaaatcaagccgctggcttctgcttctatcgcccaggttcataccgcgcgattgaaaagcaatggtaaagaggtggtgattaaagtcatccgcccggatattttgccggttattaaagcggatctgaaacttatctaccgtctggctcgctgggtgccgcgtttgctgccggatggtcgccgtctgcgcccaaccgaagtggtgcgcgagtacgaaaagacattgattgatgaactgaatttgctgcgggaatctgccaacgccattcagcttcggcgcaattttgaagacagcccgatgctctacatcccggaagtttaccctgactattgtagtgaagggatgatggtgatggagcgcatttacggcattccggtgtctgatgttgcggcgctggagaaaaacggcactaacatgaaattgctggcggaacgcggcgtgcaggtgttcttcactcaggtctttcgcgacagctttttccatgccgatatgcaccctggcaacatcttcgtaagctatgaacacccggaaaacccgaaatatatcggcattgattgcgggattgttggcagcctaaacaaagaagataaacgctatctggcagaaaactttatcgccttctttaatcgcgactatcgcaaagtggcagagctacacgtcgattctggctgggtgccaccagataccaacgttgaagagttcgaatttgccattcgtacggtctgtgaacctatctttgagaaaccgctggccgaaattagctttggacatgtactgttaaatctgtttaatacggcgcgtcgcttcaatatggaagtgcagccgcaactggtgttactccagaaaaccctgctctacgtcgaaggggtaggacgccagctttatccgcaactcgatttatggaaaacggcgaagcctttcctggagagctggattaaagatcaggtcggtattcctgcgctggtgagagcatttaaagaaaaagcgccgttctgggtcgaaaaaatgccagaactgcctgaattggtttacgacagtttgcgccagggcaagtatttacagcacagtgttgataagattgcccgcgagcttcagagtaatcatgtacgtcagggacaaagccgttattttctcggaattggcgctacgttagtattaagtggcacattcttgttggtcagccgacctgaatgggggctgatgcccggctggttaatggcaggtggtctgatcgcctggtttgtcggttggcgcaaaacacgctgattttttcatcgctcaaggcgggccgtgtaacgtataatgcggctttgtttaatcatcatctaccacagaggaacatgtatgggtggtatcagtatttggcagttattgattattgccgtcatcgttgtactgctttttggcaccaaaaagctcggctccatcggttccgatcttggtgcgagcatcaaaggctttaaaaaagcaatgagcgatgatgaaccaaagcaggataaaaccagtcaggatgctgattttactgcgaaaactatcgccgataagcaggcggatacgaatcaggaacaggctaaaacagaagacgcgaagcgccacgataaagagcaggtgtaatccgtgtttgatatcggttttagcgaactgctattggtgttcatcatcggcctcgtcgttctggggccgcaacgactgcctgtggcggtaaaaacggtagcgggctggattcgcgcgttgcgtagtctggcgacaacggtgcagaacgaactgacccaggagttaaaactccaggagtttcaggacagtctgaaaaaggttgaaaaggcgagcctcactaacctgacgcccgaactgaaagcgagcatggatgaactacgccaggccgcggagagcatgaagcgttcctacgttgcaaacgatcctgaaaaggcgagcgatgaagcgcacaccatccataacccggtggtgaaagataatgaagctgcgcatgagggcgtaacgcctgccgctgcacaaacgcaggccagtagcccggaacagaagccagaaaccacgccagagccggtggtaaaacctgctgcggacgctgaaccgaaaaccgctgcaccttcccctagcagcagtgataaaccgtaaacatgtctgtagaagatactcaaccgcttatcacgcatctgattgagctgcgtaagcgtctgctgaactgcattatcgcggtgatcgtgatattcctgtgtctggtctatttcgccaatgacatctatcacctggtatccgcgccattgatcaagcagttgccgcaaggtagtacgatgatcgccaccgacgtggccagcccgttctttacgccgatcaagctgacctttatggtgagcctgattctgagtgcgccggtgattctctatcaggtgtgggcatttatcgccccagcgctgtataagcatgaacgtcgcctggtggtgccgctgctggtttccagctctctgctgttttatatcggcatggcattcgcctactttgtggtctttccgctggcatttggcttccttgccaataccgcgccggaaggggtgcaggtatccaccgacatcgccagctatttaagcttcgttatggcgctgtttatggcgtttggtgtctcctttgaagtgccggtagcaattgtgctgctgtgctggatggggattaccagcccagaagacttacgcaaaaaacgcccgtatgtgctggttggtgcattcgttgtcgggatgttgctgacgccgccggatgtcttcagccaaacgctgttggcgatcccgatgtactgtctgtttgaaatcggtgtcttcttcagtcgcttttacgttggtaaagggcgaaatcgggaagaggaaaacgacgctgaagcagaaagcgaaaaaactgaagaataaattcaaccgcccgtcagggcggttgtcatatggagtacaggatgtttgatatcggcgttaatttgaccagtagccaatttgcgaaagaccgtgatgatgttgtagcgtgcgcttttgacgcgggagttaatgggctactcatcaccggcactaacctgcgtgaaagccagcaggcgcaaaagctggcgcgtcagtatagctcctgttggagtacggcgggcgtacatcctcacgacagcagccagtggcaagctgcgactgaagaagcgattattgagctggccgcgcagccagaagtggtggcgactggtgaatgtggtctcgactttaaccgcaactttagcacgccggaagagcaggaacgcgcttttgttgcccagctacgcattgccgcagatttaaacatgccggtatttatgcactgtcgcgatgcccacgagcggtttatgacattgctggagccgtggctggataaactgcctggtgcggttcttcattgctttaccggcacacgcgaagagatgcaggcgtgcgtggcgcatggaatttatatcggcattaccggttgggtttgcgatgaacgacgcggactggagctgcgggaacttttgccgttgattccggcggaaaaattactgatcgaaactgatgcgccgtatctgctccctcgcgatctcacgccaaagccaagttcccggcgcaacgagccagcccatctgccccatattttgcaacgtattgcgcactggcgtggagaagatgccgcatggctggctgccaccacggatgctaatgtcaaaacactgtttgggattgcgttttaaagtttgcggaactcggtattcttcacactgtgcttaatctctttattaataagattaagcaatagcatggagcgagcctcaccatcgggttcggtgaaaatggcctgaaagccttcgaacgcgccttcggtaataatcaccttatcacccggataaggggttgccggatcgacaatgtctttcggtttatatacgcttagctgatgaataaccgcgcttgggactatcgctgggctcgcgccaaagcgcacgaagtggctgacaccgcgggtcgcgttgatagtcgtggtatgaatcacttctgggtcaaattccacaaacaggtagttggggaacaatggctcactgactgcagtacgttttccacgcacgattttttccagggtgatcatcggtgccaggcaattcacagcctgtctttcgaggtgttcctgggcacgttgaagttgcccgcgcttgcagtacagtaaataccaggattgcataatgactcttatccgtttaatcggggcgcaaggatagcaaaagctttacgctaagttaattatattccccggtttgcgttataccgtcagagttcacgctaatttaacaaatttacagcatcgcaaagatgaacgccgtataatgggcgcagattaagaggctacaatggacgccatgaaatataacgatttacgcgacttcttgacgctgcttgaacagcagggtgagctaaaacgtatcacgctcccggtggatccgcatctggaaatcactgaaattgctgaccgcactttgcgtgccggtgggcctgcgctgttgttcgaaaaccctaaaggctacagtatgccggtgctgtgcaacctgttcggtacgccaaagcgcgtggcgatgggcatggggcaggaagatgttagcgcgctgcgtgaagttggtaaattattggcgtttctgaaagagccggagccgccaaaaggtttccgcgacctgtttgataaactgccgcagtttaagcaagtattgaacatgccgacaaagcggctgcgtggtgcgccctgccaacaaaaaatcgtctctggcgatgacgtcgatctcaatcgcattcccattatgacctgctggccggaagatgccgcgccgctgattacctgggggctgacagtgacgcgcggcccacataaagagcggcagaatctgggcatttatcgccagcagctgattggtaaaaacaaactgattatgcgctggctgagccatcgcggcggcgcgctggattatcaggagtggtgtgcggcgcatccgggcgaacgtttcccggtttctgtggcgctgggtgccgatcccgccacgattctcggtgcagtcactcccgttccggatacgcttagtgagtatgcgtttgccggattgctacgtggcaccaagaccgaagtggtgaagtgtatctccaatgatcttgaagtgcccgccagtgcggagattgtgctggaagggtatatcgaacaaggcgaaactgcgccggaagggccgtatggcgaccacaccggttactataatgaagtcgatagtttcccggtatttaccgtgacgcatattacccagcgtgaagatgcgatttaccattccacctataccgggcgtccgccagatgagcccgcggtgctgggtgtcgcactgaacgaagtgtttgtgccgattctgcaaaaacagttcccggaaattgtcgatttttacctgccgccggaaggctgctcttatcgcctggcggtagtgacaatcaaaaaacagtacgccggacacgcgaagcgcgtcatgatgggcgtctggagcttcttacgccagtttatgtacactaaatttgtgatcgtttgcgatgatgacgttaacgcacgcgactggaacgatgtgatttgggcgattaccacccgtatggacccggcgcgggatactgttctggtagaaaatacgcctattgattatctggattttgccagccctgtctccgggctgggtagtaaaatggggctggatgccacgaataaatggccgggggaaacccagcgtgaatggggacgtcccatcaaaaaagatccagatgttgtcgcgcatattgacgccatctgggatgaactggctatttttaacaacggtaaaagcgcctgatgcgcgtttgttttgccctatttatcgatccgacagagaaagcgcatgacaaccttaagctgtaaagtgaccagcgtagaagctatcacggataccgtatatcgtgtccgcatcgtgccagacgcggccttttcttttcgtgctggtcagtatttgatggtagtgatggatgagcgcgacaaacgtccgttcagtatggctagcacgccggatgaaaaagggtttatcgagctgcatattggcgcttctgaaatcaacctttacgcgaaagcagtcatggaccgcatcctcaaagatcatcaaatcgtggtcgacattccccacggagaagcgtggctgcgcgatgatgaagagcgtccgatgattttgattgcgggcggcaccgggttctcttatgcccgcagcattttgctgacagcgttggcgcgtaacccaaaccgtgatatcaccatttactggggcgggcgtgaagagcagcatctgtatgatctctgcgagcttgaggcgcttagcttgaagcatcctggtctgcaagtggtgccggtggttgaacaaccggaagcgggctggcgtgggcgtactggcaccgtgttaacggcggtattgcaggatcacggtacgctggcagagcatgatatctatattgccggacgttttgagatggcgaaaattgcccgcgatctgttttgcagtgagcgtaatgcgcgggaagatcgcctgtttggcgatgcgtttgcatttatctgagatataaaaaaacccgcccctgacaggcgggaagaacggcaactaaactgttattcagtggcatttagatctatgacgtatctggcaaaccatgcccgatgcgacgctgtcgcgtcttatcgtgcctacaaatagtccgaaccgtaggccggataaggcgtttacgccgcatccggcaattggtgcatgatgcctgatgcgacgctgtcgcgtcttatcgtgcctacaaatagtccgaaccgtaggccggataaggcgtttacgccgcatccggcaattggtgcatgatgcctgatgcgacgctggcgcgtcttatcaggcctacattggtgccggatcggtagaccggataaggcgttcacgccgcatccggcaagtggttaaacccgctcaaacaccgtcgcaataccctgacccagaccgatacacatcgtcgccagaccaaactgaacgtctttgcgttccatcagattcagcagcgtggtgctgatacgcgcaccggaacaacccagcggatgacccagcgcgatcgcgccaccgttgaggttgatcttctcgtcaatctgctcaattagtcccagatctttaatacatggcaggatctgcgcggcaaaggcttcgttcatttcaaacacgccgatatcgctggcagaaagccccgcttttttcagcgccagtttgctggccggaaccgggccgtaacccataatgcttgggtcacaaccaacgaccgccatgctacgcacacgagcgcgcggcttaagacctaattcatgggcgcggctttcactcatcaccagcatggcagctgcgccatcggaaagtgcagaagatgtgcccgccgttaccataccgtttactggatcaaacgccggacgcagcgtggcgagggcttccacggtggtttccgggcgaatcacttcgtcgtaattaaactgcttcaggacgccgtcggcatcgtgaccaccggtcgggatgatttcatttttaaatgcggcgctctgcgtggcggcccaggcgcgggcgtgactccgcgcggcaaaggcatcctgcatttcacggctgataccgtgcatacgcgccagcatttctgccgttaagcccatcatgcccgccgctttggcgacattgcggctcaggccggggtgaaaatcgacgccgtgactcatcggcacatggcccatatgctccacgccgccaaccagacatgcctgcgcatcgccagtcatgatcattcgtgctgcgtcatgcagtgcctgcatggaactaccacacaagcgattaacggtaaccgccgggacagagtgtggtacttctgccagcagcgccgcgttacgggcgatattaaaaccctgctccagcgtctgctgcacacaaccccagtaaatatcgtcgagggccgccgcttccagcgccgggttacgcgccagcaggctacgcattaaatgagcggagagatcttctgcacgcacgttacgaaaagcaccgcccttgctacggcccatcggggtgcgaattgcatcgacaatgacaacctgttccattgtgactccttaagccgttttcaggtcgccaaccggacgggctggctcaaccggaggatagtacggttcgttatgacgcgctttattacgcagaccttccggcacttcatacagcgggccgaggtgctgatattgctgtgccatatcgaggtattttgcgctaccgagggtgtccagccagcggaacgcgccgccgtggaacggagggaagcccaggccgtagaccagcgccatatccgcttccgccggagtggcgataatgccttcctccagacagcgcaccacttcgttgaccatcgggatcatcatgcgggcgataatctcttcttcgctgaagtcgcgcttcggctggctcacttctgccagcaggtcttcaacggcggcgtcttcttctttcttcggcttacctttgctgtcttctttataacgccagaaaccgaggccgttcttctgaccaaagcggttggcatcaaacagcgcgtcgatggcatcgcggtaatctttctgcatccgctgcgggaagcctgctgccatgacagcctgagcgtgatgcgcggtatcaatgcccacaacgtccagcagatatgccgggcccatcggccagccaaactgtttttccatcactttgtcgatcttgcggaaatccgcgccgtcgcgcagcagctggctgaaaccggcgaaatacgggaacagcacgcggttaacaaagaagccggggcagtcgttaaccacaatcggcgtcttgcccatcttgctcgcccaggcgacaactttcgcgatggtttcgtcggagcttttctcgccgcgaataatttctaccaacggcattcggtggaccgggttaaagaagtgcatcccgcagaagttttccgggcgttccagcgcgttggccagttcgctgataggaatggtactagtgttagacgccagcacggtatcctggcgtactttttgttcggtttctgccagtacggcttttttcactttcgggttttcaacaaccgcttctaccacaatatccacgcggtcaaatccggcgtagtcgagcgttgggtggattgtggagatcacgccagccagtttcagaccatcgatcttgccgcgctcaagctgcttgttcagcagtttcgcggcttcggtcatgccgagggttaagctcttgtcgttgatatctttcatgacaaccggcacgcctttccacgcagactggtaagcgatgccgccgcccataatgcctgcacccagcaccgcggcctgtttcggggtttcaacgtctttggtgagtttcttcgctttgccttttacatattgatcgttaaggaaaatgccgaccagtgcgcgggcttcgttggtatgcgccagcgggacaaaacttttgttttccaggtttaaggcttcttcacgaccaaaacgggccgcagcttcaatggtttttactgcggtgatgggggccggataatgtttccccgctgtttgtgcgaccatccctttagcgatggtgaagctcatggtggcttcaatcttgctcagttttagtggttccagcttcggctgacgttttgctttccagtcgaggtcgccgttaatggcctggcgtaaaaccgcctttgcgccttcaaccagtttttctgctttgactacgccatccaccagaccgattttcagcgcctgatccgcgccgacatctttaccggcggcaatgatttccagcgcactgtcagcgcccagcatacgtggcatacgtacagaaccgccaaagccaggcatgatgcccagtttggtttccggcagaccgatgcgcagatccggcgtcgccagacgataatcggtcgccagcacgcattcgcagccaccgcccagcgcatagccattgacggcagcaatggtcggcaccggcagatcttccaggcgattaaacacgctattggcaaagtgcagccactgacttaactgttcttcaggaacgaggaacagggacaaaaattcggtgatatcagcaccgacgataaaggctgctttgttgctacgcagcagcagcccttttagatcactttgctgttccagcacgccgatggcctcgccgaggctggcgacggtcgcagtgtcgagtttattaacactacctggggcatcaaataccagttcggcaatgccatcttccagccagtcaaggtacagggtgtcgcctttgtaaagcatgtcagtctcctgaatccgcaaggtgatctggtcgtaccagatgagtcgaagtgtgtattttgtgttaaaaatatgcaaacaaaagattaaagaaatgccgatctgatcacgctcggcagaaatcacgctctggatgaacgatgtgctaagatgcggagacttaaggtcaaaaaaacagaagggtaaaaaatggaaagtctggccagcctctataaaaatcatatagctaccttacaagaacggactcgcgatgcgctggcgcgcttcaagctggatgcgttacttattcactccggcgagctgttcaatgtttttctcgacgatcatccctatccgtttaaagtgaacccgcaattcaaagcgtgggtgccggtaactcaggtgccaaactgctggttgctggtggatggcgtgaacaagccgaaactgtggttctatctgccggttgattactggcacaacgtcgaaccgctgccgacctctttctggactgaagatgtggaagtgatcgcgctgccgaaagccgatggcattggtagcctgctgcctgctgcgcgcggcaatatcggttatatcggtccggtgccggaacgtgcgctgcaactgggtattgaggccagcaacatcaacccgaaaggggttatcgactacctgcattactatcgctccttcaaaactgagtacgaactggcctgtatgcgtgaagcgcagaaaatggcggtcaacggtcaccgcgcggcagaagaagcgttccgttctggcatgagcgagttcgatatcaacattgcctatctgaccgcgaccggtcatcgtgataccgacgtaccttacagcaacattgtggcgcttaacgaacacgctgcggtactgcattacaccaaactggaccatcaggcaccggaagagatgcgcagcttcctgctggatgccggggcagaatataacggctatgcggctgacctgacccgtacctggagcgcaaaaagtgacaacgactacgcgcagctggtgaaggacgttaatgatgaacaactggcgctgatcgccaccatgaaagcaggcgtcagctatgtggattaccacatccagttccatcagcgcatcgccaaactgctgcgtaaacatcaaatcatcaccgatatgagtgaagaagcgatggtcgaaaacgatcttaccgggccgtttatgccgcatggtatcggccatccgctgggcctgcaggtgcatgacgtcgctggttttatgcaggatgatagcggtacgcacctcgcggcaccggcaaaatatccgtacctgcgctgcacccgtattctccagccgggcatggtgttaaccatcgaaccgggtatctacttcatcgaaagcctactggcaccgtggcgtgaagggcagttcagcaagcacttcaactggcagaaaattgaagcactgaaaccgttcggcggcattcgtatcgaagacaacgtggtgatccacgaaaacaacgtggaaaacatgacccgggatctgaaactggcgtgatggaaagctggttaattcctgcggcaccggtcacggtcgttgaagagatcaaaaagagccgcttcataacgatgttggcgcataccgatggcgttgaggcggcgaaagcgtttgttgaaagcgtgcgggcagaacaccccgatgcccggcaccattgcgtggcgtgggtcgcgggtgcgccggatgattctcaacagctgggtttctctgacgacggggagccggcgggaacggcaggtaaaccgatgctcgcccagctaatgggcagcggcgtcggggaaattaccgctgtggtagtgcgctactacggcggcatattgcttggcaccggtgggttagtgaaagcgtatggcggcggcgtgaatcaggcgctgcgccagctaacgacccaacgcaagacgccattaaccgaatatactttgcaatgtgaatatcatcagttaaccggcattgaagcgttgctggggcagtgtgacggcaaaattatcaacagtgattatcaggcattcgttctgctgcgggtggcgcttccggcggcgaaagtggctgaattttccgcaaagctggcggattttagccgtggtagtttgcaattgttagcgattgaagaataatccccacttcgttttgcagaactaaggaagcggcagagatgcattttcgcgccattacccgaatcgttggactactggtcatcttatttagtgggaccatgattatccctgggctggtagcactcatctaccgggatggagcgggccgcgcttttacccagaccttttttgtcgccctcgccattggctctatgctgtggtggccgaaccgcaaagagaaaggcgaacttaaatcccgtgaggggtttctgatagtggtgctgttctggaccgtgctgggtagcgtcggtgcgctcccttttatcttcagcgaaagcccgaacctcacgattaccgatgcgttttttgaatctttctctggcctgaccactacgggagccactacgctggtggggctggatagcctccctcacgccatcctcttttatcgccagatgctgcaatggtttggcgggatggggatcatcgtgttggcggttgcgatactgcctatcctcggcgtgggtgggatgcagctctatcgcgcagaaatgcccggcccgctgaaagataacaaaatgcgcccgcgaattgcggaaacggcgaaaaccctgtggttgatttatgtcttgctgaccgtcgcctgtgcgctggcgttgtggtttgccggaatggatgcctttgatgccatcggccatagctttgcgactatcgctattggcggcttcagcacacatgatgccagtatcggttatttcgatagcccgactattaacactatcattgctatcttcctgctgatctccggctgtaactacggtctgcactttagtctgttaagtgggcgtagtctgaaggtttattggcgcgatccggaatttcgcatgtttatcggcgtacagtttacgctggtggttatttgtaccctcgtactgtggtttcataatgtctacagtagcgcgctgatgacaattaaccaggcgtttttccaggtggtgagcatggcgacaaccgccgggtttacaactgacagcattgcccgctggccgctctttttgccggtactgcttttatgtagtgcctttatcggcggttgcgccgggagtacgggcggtggcctgaaggtgatccgcatcctgctgctgtttaagcaggggaaccgtgagctgaaacgactggtgcatccgaacgccgtctatagcattaagctggggaatcgcgcactgccggaacgtatcctcgaagccgtttggggatttttctccgcctatgcattggtgtttattgtcagtatgctggcgattatcgccacgggcgtggatgacttttctgcctttgcgagcgttgttgcgacattgaataacctggggccagggcttggcgtggttgctgataactttaccagtatgaacccggtggctaaatggatcctgattgccaacatgctgtttggtcgtctcgaggtctttacattgctggtgctctttaccccgactttctggcgtgaatgatggagtaatacgtgaaaacattaattcttttcagtacaagggacggacaaacgcgcgagattgcctcctacctggctagcgaactgaaagaactggggatccaggcggatgtcgccaatgtgcaccgcattgaagaaccacagtgggaaaactatgaccgtgtggtcattggtgcttctattcgctatggtcactaccatagtgcgttccaggaatttgtcaaaaaacatgcgacgcggctgaatagcatgccgagcgccttttactccgtgaatctggtggcgcgcaaaccggagaagcgtactccacagaccaacagctacgcgcgcaagtttctgatgaacagccaatggcgtcccgatcgctgcgcggtcattgccggggcgctgcgttacccacgttatcgctggtacgaccgttttatgatcaagctgattatgaagatgagtggcggtgaaacggatacgcgcaaagaagttgtctataccgattgggagcaggtggcgaatttcgcccgagaaatcgcccatttaaccgacaaaccgacgctgaaataagcataaagaataaaaaatgcgcggtcagaaaattattttaaatttcctcttgtcaggccggaataactccctataatgcgccaccactgacacggaacaacggcaaacacgccgccgggtcagcggggttctcctgagaactccggcagagaaagcaaaaataaatgcttgactctgtagcgggaaggcgtattatgcacaccccgcgccgctgagaaaaagcgaagcggcactgctctttaacaatttatcagacaatctgtgtgggcactcgaagatacggattcttaacgtcgcaagacgaaaaatgaataccaagtctcaagagtgaacacgtaattcattacgaagtttaattctttgagcgtcaaacttttaaattgaagagtttgatcatggctcagattgaacgctggcggcaggcctaacacatgcaagtcgaacggtaacaggaagaagcttgcttctttgctgacgagtggcggacgggtgagtaatgtctgggaaactgcctgatggagggggataactactggaaacggtagctaataccgcataacgtcgcaagaccaaagaggggtaccttcgggcctcttgccatcggatgtgcccagatgggattagctagtaggtggggtaacggctcacctaggcgacgatccctagctggtctgagaggatgaccagccacactggaactgagacacggtccagactcctacgggaggcagcagtggggaatattgcacaatgggcgcaagcctgatgcagccatgccgcgtgtatgaagaaggccttcgggttgtaaagtactttcagcggggaggaagggagtaaagttaatacctttgctcattgacgttacccgcagaagaagcaccggctaactccgtgccagcagccgcggtaatacggagggtgcaagcgttaatcggaattactgggcgtaaagcgcacgcaggcggtttgttaagtcagatgtgaaatccccgggctcaacctgggaactgcatctgatactggcaagcttgagtctcgtagaggggggtagaattccaggtgtagcggtgaaatgcgtagagatctggaggaataccggtggcgaaggcggccccctggacgaagactgacgctcaggtgcgaaagcgtggggagcaaacaggattagataccctggtagtccacgccgtaaacgatgtcgacttggaggttgtgcccttgaggcgtggcttccggagctaacgcgttaagtcgaccgcctggggagtacggccgcaaggttaaaactcaaatgaattgacgggggcccgcacaagcggtggagcatgtggtttaattcgatgcaacgcgaagaaccttacctggtcttgacatccacggaagttttcagagatgagaatgtgccttcgggaaccgtgagacaggtgctgcatggctgtcgtcagctcgtgttgtgaaatgttgggttaagtcccgcaacgagcgcaacccttatcctttgttgccagcggtccggccgggaactcaaaggagactgccagtgataaactggaggaaggtggggatgacgtcaagtcatcatggcccttacgaccagggctacacacgtgctacaatggcgcatacaaagagaagcgacctcgcgagagcaagcggacctcataaagtgcgtcgtagtccggattggagtctgcaactcgactccatgaagtcggaatcgctagtaatcgtggatcagaatgccacggtgaatacgttcccgggccttgtacacaccgcccgtcacaccatgggagtgggttgcaaaagaagtaggtagcttaaccttcgggagggcgcttaccactttgtgattcatgactggggtgaagtcgtaacaaggtaaccgtaggggaacctgcggttggatcacctccttaccttaaagaagcgttctttgaagtgctcacacagattgtctgatgaaaatgagcagtaaaacctctacaggcttgtagctcaggtggttagagcgcacccctgataagggtgaggtcggtggttcaagtccactcaggcctaccaaatttgcacggcaaatttgaagaggttttaactacatgttatggggctatagctcagctgggagagcgcctgctttgcacgcaggaggtctgcggttcgatcccgcatagctccaccatctctgtagtgattaaataaaaaatacttcagagtgtacctgcaaaggttcactgcgaagttttgctctttaaaaatctggatcaagctgaaaattgaaacactgaacaacgaaagttgttcgtgagtctctcaaattttcgcaacacgatgatgaatcgaaagaaacatcttcgggttgtgaggttaagcgactaagcgtacacggtggatgccctggcagtcagaggcgatgaaggacgtgctaatctgcgataagcgtcggtaaggtgatatgaaccgttataaccggcgatttccgaatggggaaacccagtgtgtttcgacacactatcattaactgaatccataggttaatgaggcgaaccgggggaactgaaacatctaagtaccccgaggaaaagaaatcaaccgagattcccccagtagcggcgagcgaacggggagcagcccagagcctgaatcagtgtgtgtgttagtggaagcgtctggaaaggcgtgcgatacagggtgacagccccgtacacaaaaatgcacatgctgtgagctcgatgagtagggcgggacacgtggtatcctgtctgaatatggggggaccatcctccaaggctaaatactcctgactgaccgatagtgaaccagtaccgtgagggaaaggcgaaaagaaccccggcgaggggagtgaaaaagaacctgaaaccgtgtacgtacaagcagtgggagcacgcttaggcgtgtgactgcgtaccttttgtataatgggtcagcgacttatattctgtagcaaggttaaccgaataggggagccgaagggaaaccgagtcttaactgggcgttaagttgcagggtatagacccgaaacccggtgatctagccatgggcaggttgaaggttgggtaacactaactggaggaccgaaccgactaatgttgaaaaattagcggatgacttgtggctgggggtgaaaggccaatcaaaccgggagatagctggttctccccgaaagctatttaggtagcgcctcgtgaattcatctccgggggtagagcactgtttcggcaagggggtcatcccgacttaccaacccgatgcaaactgcgaataccggagaatgttatcacgggagacacacggcgggtgctaacgtccgtcgtgaagagggaaacaacccagaccgccagctaaggtcccaaagtcatggttaagtgggaaacgatgtgggaaggcccagacagccaggatgttggcttagaagcagccatcatttaaagaaagcgtaatagctcactggtcgagtcggcctgcgcggaagatgtaacggggctaaaccatgcaccgaagctgcggcagcgacactatgtgttgttgggtaggggagcgttctgtaagcctgtgaaggtgtgctgtgaggcatgctggaggtatcagaagtgcgaatgctgacataagtaacgataaagcgggtgaaaagcccgctcgccggaagaccaagggttcctgtccaacgttaatcggggcagggtgagtcgacccctaaggcgaggccgaaaggcgtagtcgatgggaaacaggttaatattcctgtacttggtgttactgcgaaggggggacggagaaggctatgttggccgggcgacggttgtcccggtttaagcgtgtaggctggttttccaggcaaatccggaaaatcaaggctgaggcgtgatgacgaggcactacggtgctgaagcaacaaatgccctgcttccaggaaaagcctctaagcatcaggtaacatcaaatcgtaccccaaaccgacacaggtggtcaggtagagaataccaaggcgcttgagagaactcgggtgaaggaactaggcaaaatggtgccgtaacttcgggagaaggcacgctgatatgtaggtgaagcgacttgctcgtggagctgaaatcagtcgaagataccagctggctgcaactgtttattaaaaacacagcactgtgcaaacacgaaagtggacgtatacggtgtgacgcctgcccggtgccggaaggttaattgatggggttagccgcaaggcgaagctcttgatcgaagccccggtaaacggcggccgtaactataacggtcctaaggtagcgaaattccttgtcgggtaagttccgacctgcacgaatggcgtaatgatggccaggctgtctccacccgagactcagtgaaattgaactcgctgtgaagatgcagtgtacccgcggcaagacggaaagaccccgtgaacctttactatagcttgacactgaacattgagccttgatgtgtaggataggtgggaggctttgaagtgtggacgccagtctgcatggagccgaccttgaaataccaccctttaatgtttgatgttctaacgttgacccgtaatccgggttgcggacagtgtctggtgggtagtttgactggggcggtctcctcctaaagagtaacggaggagcacgaaggttggctaatcctggtcggacatcaggaggttagtgcaatggcataagccagcttgactgcgagcgtgacggcgcgagcaggtgcgaaagcaggtcatagtgatccggtggttctgaatggaagggccatcgctcaacggataaaaggtactccggggataacaggctgataccgcccaagagttcatatcgacggcggtgtttggcacctcgatgtcggctcatcacatcctggggctgaagtaggtcccaagggtatggctgttcgccatttaaagtggtacgcgagctgggtttagaacgtcgtgagacagttcggtccctatctgccgtgggcgctggagaactgaggggggctgctcctagtacgagaggaccggagtggacgcatcactggtgttcgggttgtcatgccaatggcactgcccggtagctaaatgcggaagagataagtgctgaaagcatctaagcacgaaacttgccccgagatgagttctccctgactccttgagagtcctgaaggaacgttgaagacgacgacgttgataggccgggtgtgtaagcgcagcgatgcgttgagctaaccggtactaatgaaccgtgaggcttaaccttacaacgccgaaggtgttttggcggattgagagaagattttcagcctgatacagattaaatcagaacgcagaagcggtctgataaaacagaatttgcctggcggcagtagcgcggtggtcccacctgaccccatgccgaactcagaagtgaaacgccgtagcgccgatggtagtgtggggtctccccatgcgagagtagggaactgccaggcatcaaataaaacgaaaggctcagtcggaagactgggcctttcgttttatctgttgtttgtcggtgaacgctctcctgagtaggacaaatccgccgggagcggatttgaacgttgcgaagcaacggcccggagggtggcgggcaggacgcccgccataaactgccaggcatcaaattaagcagaaggccatcctgacggatggcctttttgcattggcgcagaaaaaaatgccggatgcgacgctggcgcgtcttatccagcctactcttgcttatccgttctgcttttgcatccactccaccacaaaatcagccagcccctcaacatcattaatatccagtaatgcgacatcaagattaagcggcacatcactggctacagcaataacatgcctgtctatcactaattcttcaggtcgatgtccggctccatcgcgaaacagcacaatctttgcgatctcttcatgcttaaacccttcgaccagaatcaaatccagcttactggtatccattcgacttgcgagaaactgtagatccagctcttcttcgtctggtgtttccgtcatcaaggcccatcgttgctggctggcaacgatggtttgtaccgcgccagccttgcgcagctcatagctatctttgcctggcttatcaacatccatatcatggtgcgtatgcttaatcagccctggacggatccctctggcgcataatgccgggatcagttttttcaaaagcgtagtttttccggtaccactccacgcggcaaaggcgagtaacggtatcatcgtttttcctgccatcgggcaagctcctctggcgtattcacgttaacaaatgcatctttatgatcgctgaaatcaaccgcatgaccgccagccagacgcataaataccattacccggcgttctcctgcttgcagatattccagtaataaaggctcaatagcgcggtttaccagagcaatagtcgggtgatcgcgttcaccgtcatggacccacacgacaggcgcatctttgcgctgatgattaagcctggctgctaaatcagggggaatgtaaggcgtatcgcacgggcaaaacaaaaaccactcaccagcttcctgctgcattacactaagcattcctgccagagggcctgggtaatccgccagactatcttcaatcactttcagaccgcttgcctgatagatttcctgatgacgattagcattaaccacgacgtgagagagctgcgtcataagcgcgtcagcgacatgttgccataatggtttgccgtttaattcaagcaatcctttatctacgccgcccattcgtctggctttaccgcctgccagcacaacgcctgttatcgtcgtcatcagattcaccgatatcgcctcttttattgtgggattgaccctgctaacgtgtctgtctcaagagtaaggagcatcactatgaaatgtaaacgtctgaatgaagttattgaactcctccagccagcctggcaaaaagagccagaccttaacctgctgcaatttttgcagaaactggcgaaagagagtggttttgacggcgaactggcggatttgacggatgacattctgatctatcacctgaaaatgcgtgattccgcgaaagatgcggtgatcccgggtttgcagaaagattatgaagaagacttcaaaacggcgctgttacgcgctcgcggcgtaattaaagagtaaaagcttgtaagcggcgccaccaaaatcatcgtgaaatgatatccttcgtcattcgtaatgttttccggatgatgggatgaataacagcgcttttactttccagacactacacccggataccatcatggacgctctgtttgagcatgggatccgggtggattccggtcttaccccgcttaacagctatgaaaaccgtgtctatcaatttcaggacgaagatcgtcgacgttttgtcgtcaaattttatcgccctgaacgttggacagccgatcaaatcctcgaagaacatcaatttgcgttgcagctggtaaatgatgaagttccggtcgcagcacctgtggcctttaacggtcagactttattgaatcatcagggattttatttcgctgtttttccaagcgtcggtggtcgccagttcgaagctgataatatcgatcagatggaagcggttgggcgttatttagggcgtatgcaccagacggggcgcaaacagctttttatccatcgcccgaccatcggtttgaacgaatatctcattgagccacgcaagctgtttgaggacgctacactgataccttccgggttgaaagcggcattcctgaaagcgacagatgagctgattgccgccgttacagcacactggcgggaagatttcaccgttctgcggctacatggagactgccacgccgggaatattctctggcgcgatggtccaatgtttgttgatctggatgatgcacgtaatggtccagccgttcaggatttgtggatgttgctcaatggcgataaagccgagcagcggatgcaactggaaactattattgaagcttatgaagaatttagcgagttcgacaccgctgaaatcggactgattgaacctttacgcgccatgcgtttggtttattatcttgcctggctaatgcggcgttgggctgatcccgcgttcccgaaaaatttcccgtggttaaccggggaagattactggctgcgacagacggcgacttttatagaacaggcaaaagttctacaagaaccccctttgcaattaacacctatgtattaatcggagagagtagatcatgaaaaagatttggctggcgctggctggtttagttttagcgtttagcgcaagcgcggcgcagtatgaagatggtaaacagtacactaccctggaaaaaccggtagctggcgcgccgcaagtgctggagtttttctctttcttctgcccgcactgctatcagtttgaagaagttctgcatatttctgataatgtgaagaaaaaactgccggaaggcgtgaagatgactaaataccacgtcaacttcatgggtggtgacctgggcaaagatctgactcaggcatgggctgtggcgatggcgctgggcgtggaagacaaagtgactgttccgctgtttgaaggcgtacagaaaacccagaccattcgttctgcttctgatatccgcgatgtatttatcaacgcaggtattaaaggtgaagagtacgacgcggcgtggaacagcttcgtggtgaaatctctggtcgctcagcaggaaaaagctgcagctgacgtgcaattgcgtggcgttccggcgatgtttgttaacggtaaatatcagctgaatccgcagggtatggataccagcaatatggatgtttttgttcagcagtatgctgatacagtgaaatatctgtccgagaaaaaataattcaatgtaaattacataaagcccgtgaatattcacgggctttttttattatttaataaatataaatacattctgataatgcatcctgccgctggacattatttcagcataagtggatattcaaagttttgctgttttatcagggaatatttatatgatacgtaagagtgctacaggtgttattgttgcgttagccgtaatctggggtggtggcacatggtacacaggtacgcaaattcagcctggtgtcgaaaaatttattaaagattttaacgatgctaaaaagaaaggtgaacatgcctacgatatgacgttaagttatcaaaattttgacaaaggcttttttaattcccgttttcaaatgcaaatgacattcgataacggtgcacccgatctcaatatcaagccaggccagaaagttgtatttgatgtggatgttgagcacggtccgttgcccatcacaatgttaatgcatggtaatgtcatcccagcactggcagcggcaaaagtgaacttagtgaataatgaactgacacaaccgctatttatcgccgcgaaaaataaaagccccgtggaagcgacattgcgattcgcgtttggtggcagtttctctacgacattagatgttgcccctgcagagtatggaaagttttcttttggtgagggccagtttacttttaatggtgatggtagtagtttgtctaacctggatattgaaggcaaagtcgaagatattgttctgcaattaagtccaatgaacaaagtaacggcaaaaagttttaccattgattctctggcgcgattagaagaaaagaaatttccggttggtgaaagcgagagcaaatttaatcagattaacattatcaatcacggggaagacgttgcccaaatcgatgctttcgttgcaaaaaccaggctggatcgcgttaaagacaaagattatatcaatgtcaatctcacctacgaacttgataagttaacaaaagggaatcagcaactcggtagtggtgagtggagtttgattgctgaatctattgatcccagtgcagtgcgccaatttatcatccagtataacattgcgatgcagaagcagcttgctgcacaccctgagttagcaaacgatgaagttgctctgcaagaagtgaatgctgcattgttcaaagagtatttaccgttattacaaaaaagtgagccgaccattaaacaaccggtaagatggaagaacgcactcggcgaactaaatgccaatctggatatcagtattgccgacccagccaaatctagtagttccacaaacaaagatatcaaaagcctcaattttgatgtgaagttaccgcttaatgtcgtcacagaaaccgcaaaacagcttaatttatctgaaggaatggatgcggaaaaagcgcaaaagcaggctgataaacaaatcagcgggatgatgacattaggtcagatgtttcagttaatcacgattgacaacaataccgccagcctgcagctgcgttatacaccgggtaaagttgtttttaacggacaggagatgagcgaagaagaatttatgtctcgtgccggacgttttgttcattaaaatactcactcgcctctgctcattcagaggcgagtaaaacttacttattctgacgctgactactcatgagagacgtcagaagccggtctttttcctgccacaaactgttcagccattgctgaaaatggcgcttaaagcttttgtcattgatgtagtcgccatgtaactcatcggcaataggctgtaaatccacatgtacgacaatccgcgtcagtttaccgcttaacatatcgaagaacggctgacggttattgtccggataacacagcgtaacattaagcagtttatcgaattgtttacccagtacatttagcgccatcgcaatgcctgccgcctttggtggcaacaagttttgaaaagtggagtgggtttgctgatgtttttcttgcgtgaaacgggagccttcaacgaaattgacaatggtggtgggatgcaggcgaaacttttcacaagaacgccgagtggtttcaacatctttaccacgtcgctccggatgacgtaataaataagcgcgggaataacgcttcataaacggcatatccaggctccagcacgccaggccaagaaatggcacccaggccagctgttgcttgaggaaatatttattcatcggaatgtgcttacgaaacagcacgcacagtacgacaacatctgcccaactacggtggttacaaataagcagataccagttcttcttacttaacccttccagcccgtgaacttcccattgaaggtgtgggttcagatgcagtaataccgccagaccttcacaccagcaatacatcataaaatcacaaaaacggctaacctttcgccaaatgactggcacaggtagcaatagttttacaatcccggcaatgatgatcgggacggaacaaaaaatagtgaccaaaatggtcaatacgatactcagcaaaagggttatcgcagcgagtattctcgtcataatgaatttattcaaaaggttagccatagacagtgcgctaaagaagcgcaaggcgcagattttagcagaaaacgacccaaataacggatgatccttaaggagaaaaataattcatatctatccacattagaaaaaatcccattatctcaattattagggatggatttatttttaactgcatgaaaaacaaagacaaacatcatgctgtaaaaagcatgataataaattaaaagcgatgtaaataatttatgcacaaagttatccacatgacgatttgcgagcgatccagaagatctacaaaagattttcacgaaaagcggtgaaaaactcatgttttcatcctgtctgtggcatcctttacccataatctgataaacaggcacggacattatggttcagatcccccaaaatccacttatccttgtagatggtagttcttatctttatcgcgcatatcacgcgtttcccccgctgactaacagcgcaggcgagccgaccggtgcgatgtatggtgtcctcaacatgctgcgcagtctgatcatgcaatataaaccgacgcatgcagcggtggtctttgacgccaagggaaaaacctttcgtgatgaactgtttgaacattacaaaagtcatcgcccgccaatgccggacgatctgcgtgcacaaatcgaacccttgcacgcgatggttaaagcgatgggactgccgctgctggcggtttctggcgtagaagcggacgacgttatcggtactctggcgcgcgaagccgaaaaagccgggcgtccggtgctgatcagcactggcgataaagatatggcgcagctggtgacgccaaatattacgcttatcaataccatgacgaataccatcctcggaccggaagaggtggtgaataagtacggcgtgccgccagaactgatcatcgatttcctggcgctgatgggtgactcctctgataacattcctggcgtaccgggcgtcggtgaaaaaaccgcgcaggcattgctgcaaggtcttggcggactggatacgctgtatgccgagccagaaaaaattgctgggttgagcttccgtggcgcgaaaacaatggcagcgaagctcgagcaaaacaaagaagttgcttatctcagttaccagctggcgacgattaaaaccgacgttgaactggagctgacctgtgaacaactggaagtgcagcaaccggcagcggaagagttgttggggctgttcaaaaagtatgagttcaaacgctggactgctgatgtcgaagcgggcaaatggttacaggccaaaggggcaaaaccagccgcgaagccacaggaaaccagtgttgcagacgaagcaccagaagtgacggcaacggtgatttcttatgacaactacgtcaccatccttgatgaagaaacactgaaagcgtggattgcgaagctggaaaaagcgccggtatttgcatttgataccgaaaccgacagccttgataacatctctgctaacctggtcgggctttcttttgctatcgagccaggcgtagcggcatatattccggttgctcatgattatcttgatgcgcccgatcaaatctctcgcgagcgtgcactcgagttgctaaaaccgctgctggaagatgaaaaggcgctgaaggtcgggcaaaacctgaaatacgatcgcggtattctggcgaactacggcattgaactgcgtgggattgcgtttgataccatgctggagtcctacattctcaatagcgttgccgggcgtcacgatatggacagcctcgcggaacgttggttgaagcacaaaaccatcacttttgaagagattgctggtaaaggcaaaaatcaactgacctttaaccagattgccctcgaagaagccggacgttacgccgccgaagatgcagatgtcaccttgcagttgcatctgaaaatgtggccggatctgcaaaaacacaaagggccgttgaacgtcttcgagaatatcgaaatgccgctggtgccggtgcttagtcgcattgaacgtaacggtgtgaagatcgatccgaaagtgctgcacaatcattctgaagagctcacccttcgtctggctgagctggaaaagaaagcgcatgaaattgcaggtgaggaatttaacctttcttccaccaagcagttacaaaccattctctttgaaaaacagggcattaaaccgctgaagaaaacgccgggtggcgcgccgagtacgagcgaagaggtactggaagaactggcgctggactatccgttgccaaaagtgattctggagtatcgtggtctggcgaagctgaaaagcacctacaccgacaagctgccgctgatgatcaacccgaaaaccgggcgtgtgcatacctcttatcaccaggcagtaactgcaacgggacgtttaagcagtaccgatcctaacctgcaaaacattccggtgcgtaacgaagaaggtcgtcgtatccgccaggcgtttattgcgccagaggattatgtgattgtcagtgcggactacagccagattgaactgcgcattatggcgcatcttagccgtgacaaaggcttgctgaccgcattcgcggaaggaaaagatatccaccgggcaacggcggcagaagtgtttggtttgccactggaaaccgtcaccagcgagcaacgccgtagcgcgaaagcgatcaactttggtctgatttatggcatgagtgctttcggtctggcgcggcaattgaacattccacgtaaagaagcgcagaagtacatggacctttacttcgaacgctaccctggcgtgctggagtatatggaacgcacccgtgctcaggcgaaagagcagggctacgttgaaacgctggacggacgccgtctgtatctgccggatatcaaatccagcaatggtgctcgtcgtgcagcggctgaacgtgcagccattaacgcgccaatgcagggaaccgccgccgacattatcaaacgggcgatgattgccgttgatgcgtggttacaggctgagcaaccgcgtgtacgtatgatcatgcaggtacacgatgaactggtatttgaagttcataaagatgatgttgatgccgtcgcgaagcagattcatcaactgatggaaaactgtacccgtctggatgtgccgttgctggtggaagtggggagtggcgaaaactgggatcaggcgcactaagattcgcctgaacatgccttttttcgtaagtaagcaacataagctgtcacgttttgtgatggctattagaaattcctatgcaacaactgaaaaaaaattacaaaaagtgctttctgaactgaacaaaaaagagtaaagttagtcgcgtagggtacagaggtaagatgttctatctttcagaccttttacttcacgtaatcggatttggctgaatattttagccgccccagtcagtaatgactggggcgttttttattgggcgaaagaaaagatccgtaatgcctgatgcgctatgtttatcaggccaacggtagaattgtaatctattgaatttacgggccggatacgccacatccggcacaagcattaaggcaagaaaattattcgccgtcctgcgtttcttctacaggctgcatctcgctaaaccaggtatccagtttctgccgcagcttgtccacgccttgtttcttcaagctagaaaacgtttcaacctgcacatcaccgttaaacgccagtacagcttcacgcaccatattcaattgcgctttacgtgcgccgcttgccagtttgtccgctttggtcagcagcaccagaacggcgatattgctgtctaccgcccactcaatcatctgctgatccaaatctttcagcggatggcgaatatccattagcaccaccagaccttgcaggctctgacgtttttcgaggtattcgccgagcgcacgctgccatttgcgcttcatctcttccgggacttccgcataaccgtacccaggcaagtcaaccagacgcttgccgtcagccacttcaaacaggttgataagctgggtgcgccctggggttttactggtacgagccaggcttttctggttagtcagcgtgttcagcgcgctggatttacctgcgttggaacggcctgcaaaagccacttcaattccggtatcggaaggtaggtggcgaatatcaggcgcactcatcacaaaatgcgtctgttgataattcaaattagtcaaagcggtcgtctccgtcagtcaaagctttgtggcgattatacctgaaccataataaaaggcggatttttcggcgtgagcgttgtaagtaaaagccatacgctttgtgagacattgccgatagtctttatgcgaaatagcagagaaaattctgcgatgcatgtcaaataagctatataaatcagtgaattgcttttatataaaactctgaaaatgtgcaaatactgatggcggttgattgtttgtttaaagcaaaggcgtaaagtagcacccatagagcgaggacgctaacaggaacaatgactcaggatgagggtcaggagcgccaggaggcgaagacagaggattgtcaggaagacaaacgtccggagacgtaattaaacggaaatggaatcaacacggattgttccggctaaaggaaaaacagggtgtgttggcggcctgcaaggattgtaagacccgttaagggttatgagtcaggaaaaaaggcgacagagtaatctgtcgccttttttctttgcttgctttctgttagattccgccgcaaatctatactgaataaaacggctaaaagacgaaccattatgaaaccaagttctagtaacagtcgcagcaaaggtcatgcaaaagcgcgtcgaaaaacacgcgaggagctggatcaggaagctcgtgatcgcaagcgtcagaaaaaacgtcgtggtcatgcgccgggcagccgcgcagcgggcggaaacaccacgagtggcagcaaaggccagaacgcaccaaaagatccacgtattggcagtaaaacccctattccattgggcgtgactgaaaaagtcaccaaacagcacaaaccgaagagtgagaaacctatgcttagtccgcaggcggagttggaattactggaaacggatgagcgtctggatgcgctgctggaacgtctggaagcaggcgaaaccctgagtgccgaagagcaatcctgggtggatgctaaactggatcgtattgatgagttgatgcagaaactcggcctctcttatgacgatgacgaagaagaggaagaagacgagaagcaagaagacatgatgcgtctgctgcggggcaactaacggattgccgccgtgggccttcccgttctgctgataacccttccggttatatgttatctggtgtggttattcgttaaactacagcggttgtcgcggcgacaaaagtggctgcgcaaccggctgatgacccgaaacgggcatccgccggtacgccgtagccgccagagacgccatcggaaggagtgagcatgtctgtacagcaaatcgactgggatctggccctgatccagaaatataactattccgggccacgatacaccagctacccgaccgcgctggagtttagtgaagacttcggcgaacaggcgtttttacaagccgtggcgcgctatcctgagcgtccattatctctctacgtacatatcccgttctgccataagctttgttacttctgcggttgcaataagattgttactcgccagcagcacaaggccgatcagtatctggacgcgctggagcaagaaatcgtccatcgtgcaccgctgttcgccgggcgtcacgtcagccaattgcactggggcggcggaacgccgacgtatctgaataaagcgcaaatcagccgcctgatgaagctgctgcgcgaaaacttccagttcaatgccgatgcggagattagcatcgaagtcgatccgcgggaaatcgaactggatgtactcgatcatttacgcgccgaaggctttaatcgcctgagcatgggcgtgcaggacttcaacaaagaagtgcaacgtctggttaaccgcgagcaggatgaagagttcatctttgcactgcttaaccatgcgcgtgagattggttttacctccaccaacatcgacctgatttacggcctgccgaaacagacgccggagagtttcgcctttaccctgaaacgtgtggcggagctgaaccccgatcgtctgagtgtctttaactacgcgcatctgccgaccatttttgctgctcagcgcaaaatcaaagatgctgacctgccgagtccgcagcaaaaactcgatatcctgcaggaaaccatcgccttcctgacgcaaagcggctatcagtttatcggtatggatcactttgcccgtccggatgacgagctggcggtggcccagcgtgaaggcgtgctgcatcgtaacttccagggctacaccactcagggcgataccgatctgctggggatgggcgtttccgccatcagcatgattggcgactgctacgcgcagaaccagaaagagttgaagcagtactatcagcaagtggatgaacaaggcaatgcgctgtggcgtggtattgcgctaacgcgtgatgactgtattcgccgcgatgtgattaagagcctcatctgcaacttccgtctggattacgcccctattgagaaacagtgggatttgcacttcgctgattactttgcggaagatctcaagctgctcgccccgttagcaaaagatgggctggtggatgtggatgagaagggaatacaggtgacggcgaaaggtcgcttgctgatccgcaacatttgcatgtgctttgatacctatctgcgccagaaagcgcggatgcagcagttctctcgggtgatttaaatagtgaatggcgcttcgtttacaaagtagaaaacgaaagcgccatcaatgtgctgagaacaagattgcctgatgcgctgggcaacaaaacctgttgaaattattgcttttgtaggccggataaggcgtttacgccgcatcaggcatctgagcatgatgcctgatgcggcgctggtcgcgtcttatcaggcctacgactttctccgcatccggcataaacaacgagcttcagctaaacagcccaatcattgcggcacacagcacggcagcaacggcagtttgcggtgtgtggctgtcaactgcgccactcgataccagattaattattgattccagcataatgactctccccgttttccgggcaagatcatactgaacttatcggaacagtaaagcgtaaaataccagcaatttgcgctcaataatcaatctttacacacaagctgtgaatcactccatccccagctcttttaacttacgcgtcagggtgttgcggccccagccgagtagccgcgccgcttcctgtttatgcccctgcgtatgtcgcaacgcggtcgtcagtaacgtccgctccagctctggctgcgcttcggaaagcagattttgatgaccggaacgcagcgctctgtctgcccactgcgcaagaagcgtcgcccagctgtccggttgcatttggctagtactctccgcaaccgtactttcaaacagttcgccgggcaaatcctgaatcaacacttcctgcccggcggccatcaccgttagccagcggcaggtgttttccagctggcgcacgttgcctggccacgccagacgcgtcagagcagcttcggtttccggatgcagtaacttcgcttctacgcccagttcgcgcgcggcaacctgtaaaaaatggcgcgccagacggggaatatcttcccgacgttcgcgcagcggcggcagatgaacgcggataacgttcaggcggtggaacagatcctcacggaacttaccttcctgcactcgctgttcgagattctggtgagtggcagcgataatccgcacatccactttcaccggcgcatagccgccaacgcggtaaaactgaccgtctgccagcacgcgcagcaaacgcgtctgcacatccagcggcatatcaccaatttcgtcgaggaataatgtaccgccatcggcctgttcaaaacgcccctgacgaatggtattcgcgccagtaaacgcgcctttctcgtggccaaacagttcactttcgatcaaatcttttgggatagctgccatattcagcgcgataaacggcgctttggcgcgcggactgtggcgatgcagggcatgagcgaccagttctttaccggtgccggattcgccgttaatcagcacgctaatagaagaacggctaagccgaccgataatacggaacacgtcctgcatggctggcgcttcgccgatgatatcggtcgttgggccgttaagctgaacattacgcggctgctgctgttcctggtaatgactgatagcgcgctcaaccagcgccactgcttcgtcgatatcaaacggtttgggcagataatcaaacgccccttgttgataggcgctgacggcagcatccagatcggaatgtgcggtcataatgatgaccggaagcattggatggcgctgtttaatctgcttgagcagcgccagcccgtccattcccggcatacggatatcactaagcagcacatccggcgttttgctcgccagcgcctccagcacttctgcgccgttctcaaacgtcgtacaggttaaacctgccccagcgagcgcacgttcaagcacccaacggatggaactatcgtcatcgactacccagactatccctcgttgcataaacgtcacctttatttcctgataggcaggtaaacgctgaactcggtatgccctggccaactggtaaattcaattttgccactatgctgatcaatcaaattacgagcgatggataagccaagcccggtgccaccttcgcggccgctgaccatcgggtaaaacagcgtatcctgcaaatgaggcggaatgcccggcccgttatcttccacatcaatccgcgccgccagccggtagcgctcgccgtgtaaggtcagttgaaacgcggtgcgggtacgcagaatgatttcaccgccttccggccccagcgcctgtagcgcattgcgcacaatattcagcaagacctgttcaatttgatccgggtcgtgcgccagttccggtaggctgggatcgtaatcacgaatcaaccgcacgttgtccggcagttccatgctcaccagcgttaccacgcgttcagccactttgtgaatactttcggtaacgcgcgtaccgggcagctgcggccccaacagacggtcgaccagatttcgcagccggtccgcctgttcgataatcactttggtatattcgagtagacttgggtcaggtaacgctttgctgagcagctgcgccgcgccacgtaaaccgccaagcggatttttaatctcatgtgccaggccgcgcactaaatcacgggcagcaacctgctgggcgtgctgtagctgttcctgacttaagcggcgctggttatccatcggagccatctccagcaggatcatgccgtccggcatacgctgggccgtcacagaaaggatatggctgcgcccgtcgatgaccagcgtcacttcgttatcggtaaaaccttgccccgcctccagactttcttgcatcagctcgatatttaaactgaagtagctcaacagttccggtaacggtgtaccaaacaatttgcgggagctttgggcgagcagttgttgcgcggcagggttggcgtaatggatcgccaggttgtcatcgattaacaaaatactgttaatcaggctgttgaggatctgcccagcatcgggctgcgtgcctgttgccataaagcagtctcctgaacaggttgcaccattttagtgcattatagctttttacggataaaaagcgcgaagcatcagagaattgacggagaaaaaagcccatgcagagatgggctacagatagctgacaaacttcacgttggagagcgactcacctgctccggcctaccacatcatcaccgtgtaggccggataagacgcatttgcgtcgcatccggcgtgatgtgcttgccaccgatcccaggcctgccagagacaggcgaaaagtttccacggcaactaaaacacttagacgctgtagtacagctcaaactctaccggatgcggagtcatacgcacgcggtcatcttcttcgcgacgcagagcgatgtacgcatcaattgcttcgtcagtgaacacgccaccggctttcaggaactcgcggtccagatccagttcgttcagtgcttcttccagagagcctgcaacctgtgggatctctttcgcttcttctggcggcaggtcatacaggtttttgtccatggcttcgcccggatggatcttgttcttgataccatcaagaccggccatcagcagggcagcaaagcacaggtacgggttagctgccggatccgggaaacgtacttcgatacgacgtgctttcggagaagaaaccaccggaatacggatagacgcagaacggttacgcgcagagtaagccagcattaccggtgcttcatagcccgggaccagacgcttataagagttggtggtcgggtttgccagggcgttaatcgctttagcgtgtttgattacgccgccaatgtagtacagcgcctgctcagacagacctgcgtatttgtcgcctgcgaacaggttaacgccgtttttagacagagacatgtggcagtgcataccggagccgttatcaccgaacatcggttttggcataaaggtcgcggttttaccgaagcggtgcgctacgttgtgcacaacatatttgtagatctgaatttcgtcagcttttttggtcatggtattgaagcgggtagccacttcgttctgaccagcagtcgctacttcgtggtgatgggcttcaaccaccagacccatctgttccatcaccagacacatttcagaacgaatatcctgagcgctgtctaccggtggaaccgggaagtaaccgcctttcactgccggacggtgacctttgttaccaccttcgtattgggtggaggagttccatgcgccttcgatatcgtcgatagcaacgtgggaaccggagatagaacttccgaaacggatgtcatcgaacaggaagaattcaggttctggcccgaacagtacggtgtcggcaatgccagtggaacgcaggtaatcttcggcgcgcttcgcaatggagcgcgggtcacggtcatagccttgcagggtgccaggttcaaggatgtcgcaacggataatcagggtggagtcggcgaagaacgggtcaatcactgcggtggatgcgtctggcatcagcaccatgtcggactcgttaatgcctttccagccgccaatgctggagccgtcaaacattttgccttcttcgaagaattcagcattcacctgatgagcagggatagtgacgtgctgttctttacctttagtatcggtgaagcgcaaatcaacaaacttcacttcgtgctcgttcagcatcgtcagtacgtgttcagcggacatactttaactctcctggattggtcatggtcgtcgtggtaacgaaatctgcaattattttggccgtgtcgccgtaaaaaagataaagcgaaatctgtgccaacttttaaattgcccctaaaaggcgttatcatgcgcaccatcgtgcaaaagggctgcaccacgatgtgaatgttgcaccaatatagtgcttcaatggaaacattaagcaccatgttggtgcaatgacctttggataaccctttttatgctccgtgaaagcgatcacaaagggactctgcaatacttgtttgcggaggatgtttgtgatcctgttttgtagtgcgattaatccgtgtacaataacgcgctatttctaatgcctgaggcaaagttgtgatcgaaaaattgcgtaatatcgccatcatcgcgcacgtagaccatggtaaaaccaccctggtagacaagctgctccaacaatccggtacgttcgactctcgtgccgaaacccaagagcgcgtgatggactccaacgatttggagaaagagcgtgggattaccatcctcgcgaaaaacaccgctatcaaatggaatgattaccgtatcaacatcgttgataccccggggcacgccgacttcggtggtgaagttgaacgtgtaatgtccatggtagacagtgtgctgctggtggttgacgcatttgacggcccgatgccgcaaacgcgcttcgtaaccaaaaaagcgtttgcttacggcctgaagccgattgttgttatcaacaaagttgaccgccctggcgcgcgtcctgattgggttgtggatcaggtattcgatctgttcgttaacctcgacgcgaccgacgagcagctggacttcccgatcgtttacgcttctgcgctgaacggtatcgcgggtctggaccacgaagatatggcggaagacatgaccccgctgtaccaggcgattgttgaccacgttcctgcgccggacgttgaccttgacggtccgttccagatgcagatttctcagctcgattacaacagctatgttggcgttatcggcattggccgcatcaagcgcggtaaagtgaagccgaaccagcaggtcactatcatcgatagcgaaggcaaaacccgcaacgcgaaagtcggtaaagtgctgggccacctcggtctggaacgtatcgaaaccgatctggcggaagctggcgatatcgttgcgatcacgggccttggcgaactgaacatttctgacaccgtttgcgacacgcaaaacgttgaagcgctgccggcactctccgttgatgagccgaccgtttctatgttcttctgcgttaacaccagcccgttctgcggtaaagaaggtaagttcgtaacgtctcgtcagatcctggatcgtctgaacaaagaactggtacacaacgttgcgctgcgcgtagaagaaaccgaagacgccgatgcgttccgcgtttctggtcgtggcgaactgcacctgtctgttctgatcgaaaacatgcgtcgtgaaggtttcgaactggcggtatcccgtccgaaagttatcttccgtgaaatcgacggtcgtaaacaagagccgtatgaaaacgtgactctggacgttgaagaacagcatcagggttctgtaatgcaggcgctgggcgaacgtaaaggcgacctgaaaaacatgaatccagacggtaaaggccgcgtacgtctcgactacgtgatcccaagccgtggtctgattggcttccgttctgagttcatgaccatgacttccggtactggtctgctgtactccaccttcagccactacgacgacgtacgtccgggtgaagtgggtcagcgtcagaacggcgtactgatctctaacggtcagggtaaagcggtcgcgttcgcgctgttcggtctgcaggatcgcggtaagctgttcctcggtcacggtgcagaagtttacgaaggtcagattatcggtattcatagccgctctaacgacctgactgtaaactgcctgaccggtaagaaactgaccaacatgcgtgcttccggtactgacgaagccgttgttctggttccgcctatccgcatgactctggaacaagctctggagttcatcgatgatgacgaactggtagaagtgactccgacctctatccgtattcgtaaacgtcacctgacggaaaacgatcgtcgccgcgccaaccgcgcaccgaaagacgattaatttcgttttttagtcataaaaaacctgccagcgatggcaggtttttttttgcctgtcgtgagcgcacaccaatgcgagtatctcccttataagtctgtggttacgtcaatagagagctttgtcacaattatctgcaaagtcatacgccgttaattgctttcttttttggcgtaagcgtaagatgcttcatctggtttaaaccaaaaggattaaacaatggcggagaatcaatccaccgtagaaaatgcaaaagagaaactggatcggtggttgaaagatggcatcaccacgccgggtggaaaactccctagtgaaagagagctgggagaactgctgggcattaaacgtatgacgctgcgccaggcgttgttgaacctcgaggcagaatccaaaatcttccgtaaggatcgtaaggggtggttcgtgacccagccgcgatttaattacagtccggagctgagcgcgagctttcagcgggccgcaattgagcaagggcgagagccttcctgggggtttaccgagaaaaaccgtaccagcgatattcccgagacgctcgcgccactgattgcagtgacgccaagtactgaactctatcgcatcaccggctggggggcgctggaaggacataaagttttctatcacgaaacatatattaatcctgaagttgctccgggctttattgaacaacttgaaaaccacagtttttctgcagtctgggaaaagtgctaccaaaaagagacggtagtaaaaaaattgattttcaaacccgtcagaatgccgggcgatatcagcaagtatcttggcggttctgcgggtatgccagcgatcttaattgaaaagcatcgcgccgaccagcaaggcaatattgtccaaatagatattgaatattggcgatttgaggccgtagacctcatcattaatctgtaagtgttttatggtgacaataaataacgcaagaaagattctacaacgtgtcgacactcttcctctttatttacatgcttatgcctttcatttaaatatgcggctggaaagagtgttgcctgctgatttacttgatatcgcaagtgaaaataatctacgtggcgtcaaaatccatgttctcgatggcgagcgtttttctcttggtaatatggacgataaagaactctctgcctttggggataaagcccgccgtctgaaccttgatattcatattgaaaccagcgccagtgataaggcatctattgacgaagccgtcgccatcgcgttgaaaactggggcaagctccgtacgtttttatccacgttatgaaggtaatttgcgcgacgtattaagcattatcgctaacgacattgcctatgtacgggaaacgtatcaggacagcggcctgacttttacgatcgagcagcatgaagatttaaaaagtcatgagctggtgagcctggtcaaagaaagtgagatggaatctctttccttactgtttgattttgcgaacatgatcaatgcaaatgagcatcccatcgacgctttaaaaacgatggcaccgcatattacccaggtccatatcaaagatgccttgatcgttaaagaaccgggtggcctgggtcataaagcctgtattagtggtcagggtgatatgccgttcaaagcgttattaacgcaccttatctgcctgggtgatgatgagccgcaggtgacggcatatggcctggaagaagaggttgattactatgcgccggcgttccgctttgaagacgaagatgataatccgtggatcccttatcgccagatgagtgaaacaccattgccagaaaatcatttactggatgcgcggttacgtaaagaaaaagaagatgcaattaatcagataaatcatgtgcgtaacgtactacaacaaatcaaacaagaggcaaaccatcttctgaaccactaataagttttaactcatacgcagttaataaaaccattccatatgaatggtcggtatcttattgcctttaaaacagtgattttaaaaatcgcttaggggatgttatgctcacgaaaaagaaatgggcgttatttagtctattaacactgtgtggcggtacaatttataaattaccgagcctgaaagatgcgttttatatcccgatgcaggaatatttccatttgaccaatggtcaaattggtaatgctatgagcgtaaacagttttgtcaccacagtgggcttttttctgtctatttattttgccgataaactaccgcgcagatacaccatgagtttcagtctcattgcgacaggattactgggtgtttatttgacgacaatgccggggtattggggcatcctctttgtctgggcgctatttggcgttacttgcgacatgatgaactggccggtcttgctcaagagcgtaagtcgattgggcaatagcgaacaacaaggtcggttgtttggcttcttcgaaacagggcgtggcattgtcgataccgtggtggcattttctgcgttggcagtatttacctggtttggcagtggcttattaggttttaaagcaggcatctggttctattcccttattgtgattgccgtaggcattattattttctttgtcctgaatgacaaagaagaggcaccgtccgttgaggtgaaaaaagaagacggagcaagcaaaaacaccagtatgaccagcgtgctgaaagacaaaactatctggcttatcgcttttaacgtcttcttcgtttacgcggtttactgtggcctgacattcttcattccattcctgaaaaacatctatctattgcccgttgcgctggtgggggcttacggcatcattaaccaatactgtctgaaaatgattggtggaccgattggtggcatgattagtgataagatcctgaaaagcccaagtaaatatctatgctacacctttatcattagtaccgctgcgctcgtactgttgattatgctgccgcacgaaagtatgccggtctatttagggatggcatgtacgctgggctttggcgcgatagtctttacacagcgagccgtattttttgcacctatcggcgaagcaaaaattgctgaaaataaaacaggtgcggcgatggcgttgggtagctttattggttacgctccggcgatgttctgcttcagtctgtatggctacattctggatttaaatccggggattattggctacaaaatcgtgtttggcattatggcctgcttcgcattcagtggtgcggtggtttccgtaatgctggttaagcgtattagccaacgtaagaaagagatgctggcggctgaagcttaattaatggccggatgtgcttaatccggccaacgaaaaccgtatcaaccgtaggccggataaggcgtttacgccgcatccggcagtttcacatcagaagaaatacttcgtcccgatacggatctggttttgctcgcggtggtacggttcgacgttgcggtctaaccagcgcaattcgaaataagggagccagtgttcattaatacggtaacggaaggtgttagtgatttcccaatgatgatctttcccgttgctactattaaagtcattcactcgcatgaagtaatgtggctcaaatgtataggaaaatttatcggtgattttaaaattccagtaggtgccaatttcataggtgtcattattatccagttccccgctcaaatctgtactactatagttattatggttatagcgatttcgtactgtcagattaaaccatggtacaaatttatagttgacgtccagatacactgcaccaccgctaccgatactcttatcattaattaagccaccgggctggatggttaatttatcggttggtttaaataacggataccagccttcaatttcgttatatccatgttttagttcatcttctcgctgaaagttgtaggtattggttaacataatacccgcgcccatatcgaagttataacccacacgtagcataacctcgccctgatcggaggcaagattatatgcctccctgttttcgacgtatgcgccagcaaatacgctggcagaggtcagagaagataataaaattattgcattaatctttttcataataagtccattttttaaacgtagggaggccgccacccaccaggatggaaatagcggctattgacatttataacgttacggaagccgttttttcttctgtcgccatctctttatttttgcgttggttgatttcctcaataatcaatgcaaaccgtttttcattgagtgtgtaaaagaatcccatcgtcaatgcagcaataattgccagtgcacaaggccagataaaaatgagctgacgcaaaccctgtaatgtcgcatcgctttgcgcgatgttgggaacataaccaatttgcgtcagcataatgcctggcaagaagccagcaagtgcggcagaaattttacgaaagaaggtataaccggtataaacagaaccttcggcacgaataccggttttccattcaccgtaatctacggtatctggtaccagtgcccagttcaggctgtttacaaaggccgtgccaaaaaaggcgacacaagagaacatgacgaaagtgaaagagttacttccccagaaataattcagtatatcacccaccgcccacagcaccatgccagccagataaacctgttttttaccaaaacattttacagttaatggcaccagtaatacgccgatgaggatgcatcccatactgaagaatcccatccagctcaataaattaatatcattcagcacatactgggtgtaatagacctgaatcgccagtttgatattaaatgccgccagggtacacaagttagcaatgcataaaaccagcaatggcggattccgaaatatcgcgcaaaaacttttgagaatactggctttatgtccggttggcgttgtgtccacataatgctctttgacgcctctgtagcacagcatcataaaaataaagccgccaatggagaacataagtgccgcacaggcataaccgacggtactgtcagaaaaaaggctctgcaacggaataaacgccacggtacaaatcaatagccctatggttgcaccaccctggcggtaagccgcgagctgcgcgcgctcattcgggtttttggtaattgccgggatcatcgcaccatagctgcagttcatcagactgtaactaagtccaaacatcataaacagcgcggtggcaatcgtcgttttaaccggcaaacaaaaggtggtggcgataaactggagcgttgcaattaacgccgccggaaccgctgcatataaaataaagggacgaaatttgcctttaggcccaatatttttccggctgtcgagtaaaaatccggtgagcatatcggtaaacgcggtaaaaaacttcgccaccagaaagataatcccgccatagtaagcaggcatccctaattcatcggtataaaatttgaggagatacagagtaccgatgcagagcattaaattgctaccgacgtcgcccataccataggcgattttttcccgcagattcagttttaatgtcagtggattatggtcagacataatcactccttataacgccccgcagggcgtcgtttattattattacgccgtgcgtttacgggcttctatctcttccacaatgcggacatacatcttctcgttcaggctgtagaagcaacccatcgccacaatggtgactaccgccagtgcgcttgggtagatgaagatcaactggcgtaacccttcaatggtgtggtcagcctgtgcgacgttcggcacatagccaatttgcgtcagcatccagccggggaagaaaccagccagcgcctgagacactttgcgaaagaaggtaaaaccggtgtagaccgttccttcgctacgcacgccggtgcgccactcgccgtactcgacggtgtcggaaaccagcgcccagttcaggctgttaacaaacgcactgccaaagaacgccaggcaggagaacgccacgaagctgacgctaccgccgccgaagaaatagttgagcagatcgcccagcacccaaatcagcaggccgccgatataaactttcttcttgccaaaacgtctgacactggcaggcatcaggaatacgccgatgaaaatacagcccatgctgaaaaatcccatatagctcaacaggatgggatcgttaagcacgtactgggtgtaatagacctggatggcgagcttgacgttaaacgcccctaaagtgcagaggttggcaatgcacagaatgaacagcgggcggttacccgcaattgcgcggaaagattgcagcaggcccggcttttgcgccggattagcaggctgggtttcgacataacgctctttcacgccgctgtagcagatccacataaacagcaggccaaacagactaaacagcgtggcggcgaagatatagccaagttgctgattaccttcgataagattcataactggcacgaatcccaccgtgcacagcagcaggcccagcgtagcgccgccctgacgccatgccgccagactggcgcgttcgttggggtttttggtgatagcgggaaccattgcgccgtaggagcagttcatcatgctgaaaaacagtccgtaaagcataaacagaatagtggccatcaccgttttaccggtgacatcaaacggtgtgccgacaaagttggcgatcgccagtaaggtgaccgggaaactcgcatacagaataaaaggacggaacttaccttttggaccgatcttgcgtcgggaatccaacataatgccggtacccatatcggtaaacgcagtaaagaatttactaatcaaaaagataatgccgccataggtgcctggcagccccagaacgtcggtataaaacttcaaaagataaagcgtaccgatatccagcaggatgttagaggccaggtcgccaataccgtaagagagtttctctttaaagggcaggcgtaaagttgctggatcttccgttgtgatgtgactcatgcttgttctccctttgcccatgagtttccccacgggcggatgtgattagatgctttttaagctcgcgaacagtgccgcccattcgctatcggcgcgataaaagaccggcggcttgccgatgggcgcattaacggtaacttccccgccccggaacgcttcacccgtccaggcgtggacccagttatcctccggcagatagagcgtccagtcgctacggccttcttcatgcaccggagcgaccagaatgtcgcgacctaacaggtactgatatttcagggtgtaagtgtgcgcatcgtcttcgtaatgcaggaacagcgggcgcataaccggcaggccggacttcgcattcagcgcgacggcctctttcaggtaaggtttcagggtggtgaagacggtggtcatacgggcgaaatgggcgatggtttctgcgtcgccgtcaaactgccagttgtcgccaggacggttaccttcgtgggtgcgcatcatcggcgtgaaggcgctgaaatcgcaccagcgcagcagcagctctttgctgcgcttcatctcaaacagggtggtgtaaccgccaatgtcgctgtggtgcaggccatgtccggtcattgccaggctcagcgccgccgggacaacgctcgccaggccatcgtcgagactccagtcgacgttctggtcgcccgcccacatcatggtggagtatttctggctaccggtagaaccggcgcgcataaagaaaaggatctcgccgagcttgcccgtttcttcaagggcttcgtagttacacttcgcccacagcgcaggccaggcgttatgcataatttcggcactgacgccgttatgcaagtacgtgtcggtgggcagatactcgccgaagtcagccatccagccgccgcagccgagttcaatcatgttctttttgatcacttccttgaaccaggcgtaggcttctggattagtgagatcgacaacgccgccgtaaaactcgccaaactccaccagatagtcaccgccagaggcatcttttgccagatagccgtgttgtgccgcttcttcgcagagatctttatcgctggcaacatacgggttgatataggccaggaactgcacgccctcctgattccactgcttaatgcgactatccagttgcgggtagttttcgctgttccacttccagttccacatcacgcgtttgccaaaagaggtcatacgaataccggaccagtcctgcgcccagatgccgttgaccttcacgcccgcgttacgcatggtgtccagtttcttctggcacacttccgtcccgccctgaatgccgagcgttactccgtcataaatccagtcgggcagttctggctggcgtcccagcagggcggttaatttttccagcagggaaatgtatgtgtcagcacattcaaaacgcagcgttgctttgtcttcccacagcgccagttcatggtattccggggcactaaagtcgaagttcatatagcaactgttatcaacatggcagtaatacttctgcgtgctgacaaacgtaggctgtgggaagaaagtccagtaatagtcgccgcccgcattttctttgcagtcggcctgccaggtgacataggtttgtttgttgcgaccaacgccttgttcactggtccatagcgggaacggtttgccacgcagatcgaagtaggaaaactgttcgccgcagccgtagatatggtcctctggttgagcggcaaggcgcagccagatacggttgtggttaaggttgtcgttttgtagttccagcaataaacgcccctgatcgtcggcagagatattcagcgtggcgctaatgtcagaaccacggctgaaatgaattaaccaaccatccggactctggctgacgatggcgtcggtaagcgcaattttctcctgtagtttatctttaatgctgaaattaccgcggaacatatcgatatccgctataccactgccaatccataaacaaggattatctttgctatgggttaaaataagacgttgttgaaaatgtagggtaaaactgtcgttattctgatgaaattgaaaatctaataactgtggacgtggcgtatccataactaatctccatagagttgagaacgagattgttgccttcctgttattacaggcttatgtaaaatgattctcataaaactgatatataaaaactttacagaagctgagctgtttttaacttaataaattgaagatacataatgttgcctttagcgagtgaaatgttcttcaatgattttgactgctaatcaatacaagttattttctctgtccgtaaatattaaaaaacaggcggtgcggttttccactttccagtaataataagtcgataccactattaaaggcgttaggcgggcaactcataggttcaactgccagtccctgacgctgtaatttttcaccgctataaacctgcacccagagttgatcggaacaaaggcttacgctaagcgcctgctgtggatgggtaatggtcatttcccacaaatcattagcggttttaaaggtgtggtcgatttttgtcgcggctatttttttcgcctgcgtgaaatttaaatccagctcatcaacgtggtgaagcgttgtcggattcgcgtgctcatcgacggcataaacctggtttgccggaagctggaacagatattcatcaacagatgttaagttgcaggttaaataaggatgaatacccacgccataaggcgctgcgacagtgccgatattctggcttgcgatctcaacggaaagacccgtgtgtgcgttgaggctataaacaacttgactagccagcataaacggatagccgtaactgggcggcagaaaagctgtcagggtaacgctggtggcggttaattcactaatttgccagtctcgccaggcaagcagcccgtgaatagcggctttactactatgttcattaatgggtaactgatattcctgcccctgatagcggtaacagccgttggcgatccggttcggccacggaataagcactttacccagatgcgccagcggcatctcttcgggtttgtgcgggatgactaaatgacaaccctgaaaggttaattcagccagaccagcaccgacggtcacaatggtcgcgtgataatcccccgcggcaagactaacggtctgtccactgcaatgcatattggtgatttgcatacaaggcaccttaattaagctcatacagcctcccgtgaggctgatgtcaaacccaaaaactgcaccggacggtcccctcgcccctttggggagagggttagggagaggggaaaacccgcaccctattttcagatcagttatttcgcattaatatccagcagacccgctgcaaccgctggagccatgccgggcgctaacgggatacgcgggatcaccaggcaatgcagcaggtgataaatatcctgtttgccgtcccagactttggtggtgaccttattgtccgcatccagctcctgccaccaggaaccattttcatagtccatcaggtacttaatgcagtactcccaccatgtttgataccaggtttcatactggcgatcgccagtgacggtgtagagcgcgtaggccgtacccattgcttcgacgataggccaacgtacacgttcgcggaccaccggttttccttcccagtcaacggtataaacaatcccgtccgcgccatcgggtgcccaggcatcgcgcacggtggcgttaaacagacctttggcatcttctagcagccatgctggtggttgttcgcaacgggcttccagggcagcatggatgtgcagcattaaacggccccattcgatccagtggcctggtgtacctccgaacgcgcggaagcgatgcgccgggttatctttgttgtaatccggcagcggattccactgggtatcgaagtgttcgttaacgcgataatgattatttctggcgacgtcgtggataatcacggaagccacgcgaatcgcgcgatccagccattttttgtcgtgagtgacgtcataaacaatcaagaaagcttccaccgcgtgcatattggcattgccgccgcggtactcttcggttttgctgaaggcttcgtcccaggattccaggcacatctgctcttcttcgctccagaaatatttctcgataatttcaatggtgtaatcgagcagcttgcgcgcttccgggtgacccgttgtgacggcgctggcggcacccagcagagcaaagaagtgttgatagccctgtttggaggcatccaccacgccctcgtcattcacgcaggcataccagccgccatattttttatcacgcagtgcgccgttcatggctttgataccgtgatcaaccaagctgtaagcgccaggtcgacccatcgccgcagcaacggaataaacgtgcaacatacgagcggtgatccacagatgggtgcccatctcttctttgatttgccctttattgcctaaccagccaaaaccagtcggcactacggaatttttaccaaaatcaaagatgcggtcggtttcctgttccagccaacggttgtggcttagggtgttaaaccatttcattccttttatcctcatcttagcggcgtttagccatcatttcgtcgacgatatcgccaagttgttgtaatttcggtgcgcaaacgtcacgcagcatcagctcgttgtctggtaaaccgacgacgcttgcccagactgcacggcctgccaggaatccgcttgcgcccgccgtcattgccacgcgtacggcacgcgggaacagtttttcgtcgacaccggaagagaggatcacccatggcatattgatatggtcattcagacgttgactagcacagagaagctcttgttgcggacctttgccataaagcggcatttcaactttgtagaggtcagcgccactgtcgcccagctctttggcggcatcgatgatcgcttgttcgcgatcgaatttatcgccacgacgcggtgggcggacgactggctcaatgatgcttaccagaccgtgactgtggcacagttcgttgaactctttcaccatatccagacgttgctgcgcatcttcatcactacgccacagcaccagcagttttaaggctttgccaccgtcttgtttgatctgtagcggattgattttgcggtcaataaccacgctatcgaccggaataccgttgccaggaatgaactcatcggcggcgacaatcatggcgcaacttttggcaatcgcgttttgctcaaccacctggcggtagcagaattgttgatctaccagaatcgcgctggcataagggctgagggcctttgcagcgttaactttgaaatcagttaaaacgctatcggctaccggagcgggtgccccagccgcggcaaacatcatgcgcatggcttcgcgctgatcgaccgccagcatggcaaaaccgccgcttgcgcgcgtaatgtcgttgatggtgtacttattcattcatttattcctttatccagtcgttacatttttactttggcagtcatcccggcactgacacggacctgttccagaatggcggaccagtcctggcgaccgcgacccgctgcgcgcgcctggctataaacctcccgactggcggcccccagcggcattggcacatgcagctggttggcgacatcaagggcgatgccaagatccttatgggcaagatcgatcatgaaggcgggagaaagatctccgctgaggactttgtttggccaggaagtggtgaagtgacctttaccggcggcggtaccgctcatcactttgacggcaacatcgaagggaagattcagggcttcgcacaaaacggcggcttctgcgctaagcgcattgagcgcgatgctcatgtagttgttgatgagcttaacgcggatccccatgcccggaccgccagcgttgatcaactcactgcccatcgccatcaggatcggtgtggcacgttcaacttgttcagcggtgccgccagccagcagtaacagagtaccggtaatggcatttgcagaagtacggcctaccggaacatccatcatgctgaagcctttggcttgcatatcggcaatcaatttatcggtttgcagcggatggatggtggacatatcaatgaccagcgcatcggtagataagccttcgcaaacgccgttttcaccgaacaacacgttgcgcaccagatcgccattcggcaacatggtaatgataaattcggcatctttagcggcctgcgccgggttggcggcgggagtcgcacctttgtctaccagatgccgcacagcttcggcgttcacatcaaagacgcgaagttgatgcccttgctgcaataaattgctcgccattgggctacccatttgtcctaaaccgataaacgcgattgctgccataaccctctcctgaatacagttatgtcactttttgtcatttatgacatgctttgcttgtctgtttttgatcgtatttgtaatttatcgtcaaaaaattgacagccgtcactttttaaacaattggtgaaattaaaatgaacgcatcccaaaatgtttaaggaatgaccatgattcgtgttgcttgtgtaggtataaccgtgatggatcgcatctattacgtggaagggttaccgacggagagcggtaaatacgtggcgagaaattatacggaagttggtggcgggccagcggcgacggcagcggttgcggcggcaaggctgggggcgcaggtcgattttattggtcgcgtaggtgatgacgacacgggcaacagcctgctggcagagctggaatcctggggcgttaacacccgttacaccaaacggtataaccaggcgaaatctagccaatccgccatcatggtggataccaaaggcgagcggataatcattaactaccccagcccggatctgctgcctgacgcagagtggttggaggaaattgatttctctcagtgggatgttgtgctggcagatgtacgctggcacgacggcgctaaaaaagccttcaccctggcccgtcaggcgggtgtgatgaccgttctggacggggacattacgccgcaggatatcagtgagctggtggcattaagcgatcacgcggcctttagtgaaccgggtctggcgcgcttaacgggcgtgaaagagatggccagtgcgctaaaacaggcacaaacgctcacaaatggtcatgtctatgtgacccagggtagcgcaggctgcgactggctggaaaatggtgggcgtcagcatcaaccggccttcaaagttgatgtggtagataccacaggtgcgggtgatgtttttcacggcgctttggcggtggcgctggcaacaagtggggatttagcggagagtgtccgcttcgccagcggtgtagcggcgttaaaatgcacacgtcccggtggacgagccgggatccctgactgtgatcaaacccgatcttttttgagtctttttgtataaaatgccagggtgatggtttttcgaggaattttcatgagccttaccgaactaaccggtaacccgcggcacgaccaactcctcatgctgatcgccgagcgtgggtatatgaatattgatgagctggcaaatctgctggatgtctccacgcagacggtccgccgggatattcgtaaattaagcgagcaaggcctgattacgcgccatcacggtggcgcgggtcgggcttccagcgtcgttaatacggcgttcgagcagcgtgaggttagccaaaccgaggaaaaaaagcgattgccgaagcggtggcagactatattcctgatggtagtacaatatttatcaccattggtacgactgttgagcatgttgcccgggcgttacttaaccataatcatttgcggataatcaccaacagcctgcgtgtggcgcatattctttaccacaacccgcgctttgaagtgatggtgcccggcggtacgttgcgctctcataatagcgggatcattggccctagtgcggcgtcctttgtggctgattttcgtgctgattatctggtaacaagcgttggggcgattgagagcgatggcgcgttgatggagtttgatgtaaacgaagctaacgtggtgaaaacgatgatggcgcacgcgagaaatattctgctggtcgccgatcacactaagtatcatgctagcgcggcggttgaaattggtaacgtggcacaggtcactgcgctctttaccgacgagctgccgcccgctgcgctaaaaagtcgcttacaagacagccaaattgaaatcattcttccccaggaagacgcgtaaatttttgtgaccgttaacctggcttcataccttgccacatagccaaacccatcctttcccgctacagttaatttcttgtggcgcgaaaggaggcaaaaatgctctatatctttgatttaggtaatgtgattgtcgatatcgactttaaccgtgtgctgggagcctggagcgatttaacgcgtattccgctggcaagccttaagaagagttttcatatgggggaggcgtttcatcagcatgagcgtggggaaattagcgacgaagcgttcgcagaggcgctgtgtcatgagatggctctaccgctaagctacgagcagttctctcacggctggcaggcggtgtttgttgcgctgcgcccggaagtgatcgccatcatgcataaactgcgtgagcaggggcatcgcgtggtggtgctttccaataccaaccgcctgcataccaccttctggccggaagaatacccggaaattcgtgatgctgctgaccatatctatctgagccaagatctggggatgcgcaaacctgaagcacgaatttaccagcatgttttgcaggcggaaggttttagtcccagcgatacggtctttttcgacgataacgccgataatatagaaggagccaatcagctgggcattaccagtattctggtgaaagataaaaccaccatcccggactatttcgcgaaggtgttatgctaaaaaccattcaggacaaagccaggcaccgtacccgtccactatgggcctggctaaaactactctggcaacgcattgatgaggacaacatgacaaccctggcaggtaaccttgcctatgtgagcttgctcagtttagtgccgctggttgccgttgtttttgcgcttttcgccgcttttcccatgttttccgacgtcagcattcagttacgtcactttatttttgccaactttctgcctgctactggcgatgttattcagcggtatatcgaacaatttgttgccaattccaacaagatgaccgccgttggggcgtgcgggctgatcgtcaccgcgttattgttgatgtactccatcgatagcgcgttgaataccatctggcgcagtaaacgagcgcgaccaaaaatttacagcttcgccgtgtactggatgattttaacgctggggccgctgctggcaggggccagtctggcgatcagttcctatttgctctccctgcgctgggcgagcgatctcaatactgtcatcgacaacgtgctgcgtatttttccgttgctgttgagctggatctccttctggttgctgtacagcattgttcctgccatccgcgtacctaaccgcgacgcgattgtcggcgcgtttgtcgccgcactcctgttcgaagcaggaaagaaaggtttcgcgctttatatcaccatgttcccgagttatcagctcatttatggtgtgctggcggtgatccccattctctttgtttgggtctactggacatggtgtatcgtcttgcttggcgcggaaattactgtcactctcggggaataccgcaaactaaaacaagcagctgaacaagaagaagacgacgaaccatgattgcattaattcaacgcgtaacccgtgccagcgtcaccgtggagggagaagtgacgggcgaaattggcgcgggacttttggtgttattgggtgtcgaaaaggatgacgacgaacagaaagcaaaccgtctgtgcgagcgtgtgctcggctaccgcatctttagcgatgccgaaggcaagatgaatctcaacgtgcaacaggcgggcggcagtgtgctggtggtttcccagtttaccctcgccgcagataccgaacgggggatgcgcccaagtttctccaaaggtgcaagtccggatcgcgcagaggcgttatatgactatttcgtcgaacgctgccgtcagcaagagatgaacacgcaaacaggacgcttcgctgcggatatgcaggtaagcctggtcaatgatggccccgtgacattctggttgcaggtatgagccagcttccagggttgagtcgggaaacaagagagagtatcgctatgtatcaccttcgggttccacaaacagaagaagaattagagcgttactatcagtttcgctgggaaatgttgcgtaagcccctgcatcaaccaaaaggtagcgaacgcgacgcgtgggatgcgatggcgcatcaccagatggtcgtcgacgagcagggtaatctggtggcggtaggccgactgtatattaatgccgacaatgaagcgtccattcgctttatggccgttcatcccgacgtgcaggacaaagggttaggcacgctgatggcgatgaccctggagagcgtggcgcgtcaggaaggcgttaagcgcgtgacctgtagcgcccgtgaagacgcggtggagtttttcgccaagctggggtttgttaatcagggagaaatcaccacgccaaccaccacgccgattcgccattttttgatgattaagcccgtcgccactctggatgacattctgcatcgcggcgactggtgcgcgcagctgcaacaggcgtggtacgaacatatcccgcttagtgaaaaaatgggcgtgcgcattcagcaatataccgggcaaaaatttatcactaccatgccagaaaccggcaatcagaatccgcaccatacgctgtttgccgggagtttattcagtctggcgacgctcactggttggggacttatctggctgatgctgcgtgaacgccacctcggcggaacgattattcttgcggatgcgcatatccgctacagcaagccgattagcggtaaacctcatgcggtagccgacctcggtgccttaagcggcgatctcgaccgtctggcgcgcggacgaaaagcacgggtgcagatgcaggtcgaaatctttggcgacgagacgccgggtgcagtgtttgaaggcacgtatatcgttctgcccgcgaagccatttggcccgtatgaagagggcgggaacgaagaagagtaactgatggagaggggcggtgctgcctctctcattcaggtcatttatattagtccttggctatttcggttatattaaataagaactctataaatttttattcttcgttggctccatacgtgtcttgctacatcactgttcaggagcatttaaatattatttgtagaactgagtggcaattatcgcagataatgcttaattcatcatcttagttcatgtttgagcgatttttgatagtcaaaaccccctctggtgccatacttttctcataaatatttttaaaatctatagctaacaaatattatgcaaagataatggactagcatcattgtcagtatcattcatttactgctctgtatgttatgaataattatgttgtatgtttgctcttaaaccgtgggaaggaggctataatggttgccaatattaatctcattaaacaagaaagttattctgttgttaatttagaaaaacaactttcccgaactgttaccaacaaaattataacgatgagcaagtaaagaccggttggtggcagtactgaccggtctgtgatgaaagattaatttcaccttaaatcctggtgctgttaggatgctgacgtttttcggctacaccattcagattatgcaaataaatatctctgaatataatatattcatagcacccataattcatcctgggcgataactaaaccatttttgagtaataaatgaaacaactgcaacactcttattatttctggaaaacgcctcgcaaaaacaaaacaacatgcaaaaatccgctttttttaaatgattttccggcgtaattttcgcacatacattaatgagtaatatatgtaaggtattggtaatggcgatgaatacggtttttcttcatttaagtgaagaggcaattaaacggctgaacaagcttcggggctggcgtaaggttagtcgatctgcaattttacgcgaagcggtagagcaatatctggaacgtcagcaattcccggtgcgtaaagcaaagggaggcaggcaaaagggggaggtagttggtgttgatgatcagtgtaaggagcataaggaatgacaaaaatttttcattcttgaatataaaaaacagatgcccttattctggtattaatacaaggctgttttacttgaacttataataactgcaactgttacatcatatctggaaaacgcctcgcaaaaataaaaaatgatgcgtaaatgagctttctttaaagattcggcaagggtacttttctctccatagattcaaaaatgatattggcgagatatttatgaactctctggcaggtatagatatgggcagaattttactcgatttaagcaatgaggtgattaagcaacttgatgatctcgaggtgcagcgtaatcttcctcgtgcggacctattaagggaagcggtagatcaatacctgataaatcaaagccaaacagcaagaaccagtgttcctggcatctggcaagggtgtgaggaagatggtgtcgaatatcagcgtaagctgcgcgaggaatggtaatgggaaaaaatgatgtcaatcagattgctgacaacgtgcgcgttgttcatgccggatgcggcgtgaacgccttatccggcctacaaagtcgtataaattcaatgtattgcagtttattggtaggcctgataagcgcagcgcatcaggcaatcttacgcttgtcatcagtctcatgcccataaccttattgatgtggtggtgggtaaattgaggccaaaccggcactggcggcatagcttgaggtggtaacgcggaatacgagagatggtgtcgtcacaccctatgagctgtaatccgggcgacctgcgccacccggaaaacgtcagagattactctccttcacccggaaacaggaacgggttgatggaactgcgggcatagccttcttgctccattcgtgcgtccagtaccagagaggcgaggtcatctgctacggcttcgatttttggatctttttcctgatagagaattttcaggtaagtgtcgcagtcatcgcagctttcggctttaatcgcggcctgttcgtcatccaggctccagtaatgcagtttgccgctctgctcgcagttgctgcattttacgcgcactacgtgccattcagtttcacacaggttgcagtgcaggtaacgtagcccctgagtggtgccaatttgcaccatgctggacaccggcatagaaccacaaaccgggcaatattgacgttgctcgccgtattcagcgcgggctttgccggggatcagattggccatctgcgcccagtagaggctcagtgcagcccagataaacggcgctttatcgctgctgacggagctgaaatcagaggcaaacagcgcgctggccatatcttccagctcctgagtgcttgccttctccagattctcaatcactgccagcgccgggccgctcatttcaggtttcagctcagcaatcagcgccatcagcagcttttgccagtgcttatcacgcggcagaacgtgaatatccagcgggggcttgccttgtgcgctggcttctttaatgcgcgcagtcagatccatctccagcggatggtcgtacagcaccacttcctgggcgtgggcgataagcgcagcaaagcgcaggtaatcacccagaggattattttctgccagctcgcgcagacgctcggcgcggcggttgtataaattcttgagccgagggaacaataacggcggaatcatatccgccgtacgtttctcgctactacccagctcatcttgcgggattatgcgaatactcattcagctttcttttccgttgtcttgcggacctcacggtaccagcgcgggtgatgtttcttcgcccaggcgctggtaacccatccttccaccatggcggtaatcgtgcctttcacccaaagggcggcgtagatatgcaccatgataaccacaattaacgccactgcggcaaaactatgcagcattaacgcgaatcggatcaccgggatactgaaagcaggcgcaaaataaggacgccagataatcacgccgctcaccagcagcagaaccaggaaaataatcgccgcccagaaaacgcatttctgaccgaagttataacgcccggtgtcacctacttcctcgttgacgacgatcttacgaatattcttcgcccaaaagatatcatcccgattgattaggttgtgatgccagtaacggaaaaacatgatgatgaagctggcaaacataaccacgccgacaaacgggtgcagaattcgcgccagctgcggtgtgcccatgatttgcatcaaccagttgaaggacgggaacaaaaagcccagcccgctcaccgccgccaggatgaagcagaaggcggtgatccagtggttgatacgttccggcgcggtgtagcgcacgatggtgtcacgtcgtttcatttgcgctcctcgtctttctcttcgtgcagattattctcttcctcatccgcacggttcggaccgacacccacgtagtggaagatactggccgcaaaggtagccgcaaagccaacagccgcgagcggtttccagatgcctttccagaatttcacggtttcgctgatttccgggttctccggcaagccatgatacagatttggcttgtcagcatggtgcagcacgtacatgacgtgtgtaccaccgacgcctgccggatcgtacagacccgcattgtcgtaaccgcgggttttcagctcagcaacgcgctcgctcgccagcgttttcatgctctctttcgtaccgaagtgaatcgcgcccgttgggcaggtcttcacgcaggctggttcttgcccaaccaccacgcggtcaacgcacagcgtacatttgtagacgcggttgtcttccgggttgaggcgcggaatgtcgaacggacagcccgcaatgcaataaccgcagccaatgcactgctcggactggaagtcgacgataccgttggcatactgaataattgcaccttccgccgggcacgctttcaggcagcctggatcggaacagtgcatacagccgtctttgcggatcagccattccagtttgtcgttctgctccacttcgctgaagcgcattaccgtccagcttttggcgcttaaatcattggggttgtcgtacaccccaatgttattgccgacggtatcgcgaatgtcgttccactcactacacgccacctgacaggctttacagccgatacaggtggtaacgtcgatgagtttcgccacttcttcctggaagtcccgcgcctgaggcgcgggggtcagaccgttagtcgcggaacgacgaatgatatcttgagattgataagccatatgtcgtctccgttacaccttttccacattcacaaggaaggacttaaactccggcgtctgcgtgttcgcatcaccaacgaatggcgttaaagtattggcaataaagccttttttagctacgccttcatagccccagtgaatcggaataccgatggtatcgatatctttgccgttcgctttcagcgtgcgaatacgtttggtcaccaccgctttggctttgatatagccacggttggaggagactttcacggtatcgccctgggcaatgccaagtttattcgccaggctctccccgatttccacaaactgctctggctgcaaaatcgcgttcaacagcgcgtgtttggtccagtagtggaagtgctcggtcagacgataggtggttccgacatacgggaacttatcggctttacccaatgcttcggcgtcgtctttaaagatacgtgcagccgggttgctgataacgtttggatgcagcgggttagttcccagcggcgtttcaaacggctcgtagtgttccgggaacggaccttccgccatcttatcgagggcaaacagacgccccatgccttcctgctgcatgataaacggcccgacgccgctacccggaggcgctgcgctgtagtccggaatatcccagccggtccacttagtgccgtcccatttcagcaactgacgcttcggatcccacgggttaccctgcggatctgcggaggcgcggttatacagaatgcggcggttaagcggccatgcccatgcccagcccagcgtgttaccgaggccagacggatcggcgttatcacggcgtgccatctggttgccttccggcgtccagctaccggcgaaaatccagcagccacaggaggttgtaccgtcatcgcgcaattgggcgaagctactaagttgttggcctttcttgacgataaccgcaccggttgccggatcggtaatatcggccagcgccttaccgttgctctccatcgccacttcttcactagatggctcatgcggaatggcgtagttccatgtcatgttcagcacctggtccgggttcgcgccaccctgttcggcatacatcttgcgcaagcgcaggaagataccggagaggatctcgccgtcagtcagcgcaatccccggggcgtccgcacctttccagtgccactgtaaccagcgaccactgttaacgatagaaccgttctcttccgcgaagcaggtgcttggcagacggaacacttcggtctggatcttgctgctgtcaacttcgttcagctcaccgtggttctgccagaagttagaggtttcagtgttcagtgggtcgatggtgacgaggaacttcagtttgctcagacaaccgatcactttgtttttgttcgggaaactggcaacagggttaaagccctggcagatatagccattgaccttgccctctttcatcatctcgaagtattgcaggacgtcgtagcctttatcccacttcggcaaccagtcaaagccccagctattttccgccgtcgctttatcaccaaagaaggccttcatcatagagacgaagaatttcgggtagttgccccagtagtttacctggccttccagcagcggttttggcgtgttggcggtaaggtaggtttgcagatcggtctgcttctcgcttggcagcgtcatgtaacctggcaggctctggctcagcagccccaggtccgtcagcccctgaatattggagtgaccgcgcagggcgttaacgccgccgcctgccatccccatattgccgagcagcagctggatcatcgccatcgtacgaatgttttgcgcaccaacggagtgttgcgtccagccgagggcatacaggaagctggcagttttatcgtgagcactggtttctgcgatgtattcgcagactttcaggaacgcgtcttttggcgtaccacagatgttttcaaccacatctggcgtgtagcgggaaacgtgctgtttcagcaagttccacacgcagcgcggatgttgcagcgtggtatcgcgtttggcgaagccgttttcgtccagttcataagtccaggaggatttatcgtacttgcgtttttccgcgtcgtagccggtgaacaggccatcttcaaagccgtaatcctcacgcacgatcaggctggcgttggtataggcttcggtgtattcgcggttgaatttttcattgttcagcaggtacagcaatacgccactcaggaaagcaatgtcagtaccggaacgaataggggcatagtagtcagctaccgccgccgtacgcgtaaagcgaggatcgatcacaatcagcttcgcgccgttgtgaattttggcttccatcgcccagcggaacccgaccgggtgagcttcagcggcgttaccgcccatcaccacgacgaggttggcgttcttgatgtcgacccagtggttggtcatcgcaccgcgaccaaatgttggagcaagacttgctaccgttggtccgtgtcagacacgcgcctggttgtcgaccgcgagcatacccagcgcgcgggagaatttttgcgttaaatagccggtttcgttactgctcgcggaagcacacagcatcccggtggagagccagcggttaacagtcacgccttcggcgttttgcgcaatgtagttagcatcgcggtcttctttcatcagtttggcgatgcgatcaaacgcctcttcccaactgatttgctgccatttatcagaacctggcgcacggtattccggaaacttcagacggctttcggagtggatgaaatccaccaggccagcgcctttcggacaaagtgcaccgcggttgaccgggtgatccggatcgccttcgatatggaagatagatgctttggcgttttttgctccgtcaccgaggctgtacatcaacagcccacagcctacggaacaataggtgcaggtattacgggtttcgcgggtgcgcagcagtttatactgccgggtttccgcgagtgctacgctgggtgcaaaacccagtgccgctgccgtggtgcctgccataccgccagcgcagatcttaaagaactgccttctgctgacctgcatggattgctccttgtttcgacattgtcacgtcccatttacattcgcttgctgcgtgtgcagggagtgggagttatttttctttgcggaaggggccgcaaaggtccagaattggctcaatttccctccatccaggaagggtttgtaacagaataccataatgttggtgtgtgtgttcttatctggttaagagaaagtgaaaaaaacacagcgaaaagaaatcgaaaatgtgacaaatatcacaggtgttcgtcaaattgagttatggcggcgtgatgatttacaacacccacggttagatgaggtcgcggaagaagttcccgttgcgctggtctacaacggcattagccatgtggtgatgatggcgagccccaaagaccttgagtactttgcgctcggttttagcctttccgaggggattatcgaaagtccgcgcgatatcttcggcatggatgtcgttccttcctgtaatggtcttgaagtacaaattgagctttccagccgccgctttatggggttgaaggagcgccgccgggcgctggcgggacgtacgggctgtggcgtatgcggcgtggagcaacttaatgacatcggaaaaccggtgcagccgctaccgttcacccagacgtttgatctcaacaaactggatgatgcattacgtcatctcaacgattttcagccagtggggcaactgactggttgtactcacgccgctgcctggatgttgccatctggcgaactggtcggcgggcatgaagacgtgggtcgccatgtggcgctggacaaactgttaggccgccggagtcaagaaggggaaagctggcagcaaggtgcggtactggtttccagtcgtgccagttatgaaatggtgcaaaagagcgcgatgtgcggcgtagagattttgtttgcggtgtctgccgcgaccacgcttgctgtagaagtggctgagcgctgtaatctgacactggtaggtttttgtaaaccgggtcgggcaacggtttatacccatccgcagcgtttgagcaattaattaaaataagtcctgcgaaatatattaaattgcaggacttattcatttcgtgaattttattattttatttataaacaaaatgcgtgtagtggcgttttcttttttcatttattatgttcactctcttatctatatatttataaggcaattaaatgaaaaggaatttattatcttccgctattatagtcgccatcatgtccctcggtctgacgggttgtgatgataaaaaagccgaaacagaaacgctcccgcctgccaatagtcaacctgccgcaccagctcctgaagcgaaacctactgaagctcccgttgcaaaagcagaagctaaacctgaaacacctgcgcaaccggtggtcgatgaacaagcggttttcgacgaaaaaatggatgtctatatcaagtgctacaacaagttacagatcccggtacagcgcagtctggcgcgttatgctgactggctgaaagattttaaacaggggcctaccggtgaagagcgtactgtttatggcatctacggcattagtgaatccaacctcgctgagtgtgaaaaaggcgtaaaaagtgctgtggcgttaacgcctgcgctgcaaccaattgatggcgtggcggtgagttatatcgatgctgccgtggcgttgggtaataccattaacgaaatggataaatattacacccaggaaaattataaagacgatgcgtttgcgaaagggaaaacgctgcaccagacattcttaaaaaatctggaagcctttgaacctgtagccgaatcttatcatgcggcgattcaggaaattaatgataagcgtcagcttgcggaactgaaaaatattgaagaaagagaagggaaaacattccactactactctctggcagtcatgattagtgcgaaacaaattaataacctgataagccaagataagtttgatgcagaagcggcaatgaagaaagtgtctgaactggaaacgctagtggcgcaggccaaagaagcggataaaggcggcatgaatttcagctttattaatagcgcaggccagtatcaactcgaggctaaaaaatacgttcgccgcatcagagataaagtcccgtactctgactgggataaagagcaacttcaggacgcaaacagtagctggatggtcgaagactctttcccgagagcattacgcgagtacaacgaaatggttgatgactataatagcctgcgttaaacgtttttgatgataaatgcagtgtcggatgcggcgcatccgacacagttcaccccttgtgaagtaactccataaatgcctcatatcctgttaacccggcaataatctccgccggatgctgacacaatatgcttgccagatagctaaatatttttagctcatgacgcgcatcggcggcggcgcaggcgatcaagacatggttaatgacttcgttattcacctcaactggttgggcgagggtaataaaaaatccacgaaaacgtcgctcctgttcgctccagcaatgtgggatggcgaggcgattaacaatcaggttttcaccttcgccttcgcgggcgatgatgcgttgtgcttcatcggcggtaatatggtgttgtgcgactaattgcgcacaaatttgccgggtaatatgttgccagctttcaccgcgtacattgctataatgaaaacttccgggggcagagaaaaaacgctccggctgttggcgaataaatgccgtcgccagaaaatgttttatttgttcgataccggcagccgtaatgatattttttacggtgatgtaattatttaccgcgtcatccagtaaataatggctgttgttaatgatcaataacggctcaatctcttcgcgaatggcaacaagttcgcttaagctacgggcaataattacccgacaatttaaaacatcgcgctcaatggcgagctgattaatagtggcaatcgcgttctggtcgctgagcaaaatgatcggctggcgttcgttttgatgccgctccagcgcacaggcaaaatacaaaccgatcagatcgctgtcgaaaaggggaatatcgagctgttcacgcagtagcgtaataaagtgcagactcatatcaaaggccgcaggccaggcggctttcaggttattcatgctgctctggcggtgctcagcaatccacactggtgcggcaaggcaacgtaataaatgcccggtaatattctcaaccagctgcgcatcaataatattcaaactcgcgatgcccggcaccctttgcagcaacccctgcacattatcggcactaattacctgcgcttgctgatgctgtttctctatcaaacccgtcagggttcttacagcgttatcaccaagaaacagaccgctatgttcaacgatttgttttatctcgtcaccgggatattgcggccactcatcggtcagttgattacgcagggcgtaaatcgccagaatcaggctggagagataatcaccctgcatgagcggccagcggtgttggttgtcgcaggccgtggataaatgctgaaggttgtctcgtgttatgcccgccagcggaattaaaaacggatctttgcgcagcaagttcgccagcaagataacgcgtttctcttctgtctcatcaatgaaatggcccaaaccagggcggctggccaggcaacaagtgcgttcataacgctgttttaaccggggcagacgctctgctacccacgtttctggcaaattaagcgcgctggcgagttgcgcacggggagtgaaagtattcagtaataacagcgccagcagccgatcgtcgttatcgtgcttttgcagcaactgaaaaaagctgcggcgctcgaagatttccagctgatagcccgcactgccactggcgaaaatgcgggctttgccgttaagggtgaagttgagatagtcaatatcacgcaggatggtcctgccactaacgccagtctgttgcgccagctcgccaggcgtgcgcggctgttgctccagcagatcgacaatctttaactggcgttcgtttagcattaatccacctgacggaactggctaaacgcgttgactttctccgcagttaaggtcgtcagaaaaccccgtatcagcgtgagcagagcttcgtaatcggctttactaatcataccgctgttggcgtgcagataacgagttggcagacacagcgcgacaaccggacgcccgccgcccatcacgttgtagcgcccgccatccgtcgcaccggttttcatggtggaaaattgcagcggtaaatcgttatgtgcggcacagctttttaacgctgctaccagtttctggttggggaagtagcgcttgtcaaacagcatcagccccggcccctggcccagtttcagcgggtatttaatgttatcaatgcccggaacatcgcccgctacggcggtatccaacacgatcacgacgtccggtttaatgtgttccgcgctggtttgcgccccgcgtagcccaacttcttcttccacactgccaacgccatacagcgtaatttcgggattattcaccgtctgcaatagttcagccatcattgcgcagccgatgcggttatccaacgccttgccgaccactttatcttcgccccagcaggcaaaattggcttccgggctaataaaattaccaatttccacgccgcgcttttccacctcttcgcgactgttcgcgccaatatcaatgaacacctcatcaaaactcagcggttgttgcttttgcttttccgttaacgcatgaggcgcgacggaaccaatcacaccagggattttcactcccttgtgtgtgcgtatggttacccggtggttgagcatgctctgattccaccagccgccaatggtggtaaaacgcagaaaaccgctctcgtcgatgtgggtgaccataaagccgacttcatccatatgtccgacaacggcaacttttggacctttattccccttacgggcaacaaagctgcccagaccatcgaaggtgatttcattcacgcaaggttccagcgtgtttatcagaatgtcgcgaacttcctgttcatcgccgctgacggcgctggcttcgcacaactgttgcagtaactcaatgttcatggacaagctcctgttgcgcggctttcgctttgcggcgtaaccacaatcctttcaggacgataatgaaactaatgttcagcgcgaggccaatcgccagcaccagataaaagctacccaccgggctcatcaggccgatcagcgggtcaaagatacccaaaccaggtgccagacgtttgattccgaaagcgatcaccagcacgccggtaatgccgcccgccagcgtattggcggtaatcatcggcaacggagctgccagagcgtaaggaatagccggttcggttgcgactgtggcaccgaccacaatggcactactggcagcctctttttcctgtcgggtaaacagtttgggcgcaatgaacgtcgcaagacccgccgcgacgggcggcatcagcgcgacaacgccgacgatggcgtaccagtcataaatgtgtttttccagcagactgaagcagaagaaccaggcggttttattgatggggccgcccatatcgaacgccagcatcgcaccgaccagaaacgctgccgcaaacttcatacttggaggaatggtattcaggaagtggagcagcccgcccatgaggtcggacatcaccggcccgataacgtagtaagtgagcacgccgaaaaccagcagagtaacgaacgggatcagcatactaccgagcagcggttgtaatgctttgccaaggcgcactttgcggaaccagaagacgaaatagccaatcgccagccccagcaccaccgcgccgaggaatcccgcaccgctctgggtgccgagcagcgctttgtcgttcgccagatagcaaaccagaaacgccggagcgaaagccggtttatcggcaatgctgctggcaatataagcgcccatgatggggatcataaaggtgaagccaaggtaaccgatggattcaactacccaggtaaagctcggcgcgcctttgctcatatcggtatacggcaaaccgaactgcaccagcatgttggcaagcgccaccaggataccaccgccgatgacaaacggcagcgccgcagagacgcccgccatcaggtggctcatcacgctaccgctttgcacttcctgtttgccaagcttcacgccgctatctgcggcaaaaagctggctgtttgtcggtaattcgctgaaaatctggtcgatatttttcaacgcctgggagatggcaatctcataaactttcttcccggcaaaccgcgcgcgatcatcaccgctcaggccacgcccggtagcgagaatgacgtaatcggcagcggcaatctcttcgctggataagcggttttcaacgccactggacccttgagtttccacttttatggtatgaccgagagaacgggctttctgttccagggcttccgccaccatgtaggtgtgagcgatcccggcggggcagttggtgatcgcgacaatacgtaaggaactctccatcgccacttccttaactgctgagggtttgatttaacaaggcaagcgcctggtcggtatcgccctgttgcagttgatgaataaattccttgtgaataattttgcgacacagtgtgccgatgattttgacctgatcctcttcgccgctttgcggcacgccgaggcagatccagcaattgacgtcttcgccatcgctggctttccagtcaatagcctgcgctttgcgggcgaataatacgaacggttgtttaacgcaggcgcttttaccgtgcggcacggcgacaccggaaccaaatccagtagagtgcattttttcgcgcagcagcagggtttgcaggaactggtgactgtcggtgataaaaccgttttgtaacgctattgtcgccaactgcttcagaacggaataagcgccattgccctgaatattcaggtcaatacagcttgcagtaagagctgccattaatcggactccataaaatatattttaatcaattgtaatggtggagcgattaagtgatgagaggcgatatgtcggtaaacaatgacaatttgagacagagtgaaaggtcagatttgcggagtaatgcacataatggttatttaaataaaccacatgaatcattaatgggttattcattatttttgtgatttactcacaatgtatcagggaaatataacttaccgggagatgtaatatgtttaatttttcaaatcgaaatttaaaatattgtgccggaggcatctctggcacattgggcaattacggcaggtaaaacacttcttgcagctcgctactcaccgggctgttatccgggttagcgggcataacatcggtcatatatttccaccaacgttggcagacatcagtgctggcaaccgcattccagcgttcttcagattcaatctctaccatggcaaacagcagattacgcgctttgtcgagatagatggcgtagttatgcgcaccgtgagatttcagcactgcttccagttctggccagatgggattatgccgacgctgatactcttcgtgggcgtcggggtttacctgcatgacaaaggctttgcggatcatgtttgctccttacagcgccagcgcactggcgagtggcgtaacgccgaaacgcttgccgagcgctatcaactcttcacggctgatggtctgtttcatgccgcccatgctataaaccttcactaatacttgtgcacttttttctgcggtgtcgattaaaccgaaggtttcatccagcgtcggtccgctgccgaagacgccgtggaagggccacaacaccaggctatgtttttgcatctcttgtgcggtcgcctggccgatttcgtccgtgccgggcaccatccacggcaaaatgccaacgccatccgggaataccaccagacactcggtgctgccttcccccagttggcgagtgaagaccgcggtgtcgttttcaagtacataggtgagggcgatcaggttggtggcgtggcagtgcatgatcacccgatctttgccgttggtggctttaatgcgctcgcagtgggaaaggaagtgagccggaagttcggaagtggggacggcttcgttggttaacccccaaagaatgtggtagcccgcgccgtcgctgtcgacttttacgatgcctaagttagccgcaggatcaagctggacgttacggaagaatttgccgctgccggtgacaataaacggtgtatttgccagtaaaggcatgggctggctgagcgggatatagcgcggttgttggtggaaattgtcgtgatatggtgcgatatcggcgtcatccaggcgtagcgtcaggttgccgccgttgcgctcatcccagcctttcagccaggcgtcggtggtggctttgatcattccctggacaaaccaggactgagtaatgttttgcatgttctgtgttcctgtaaattcggtgttgtcggatgcacgacccgtaggccggataaggcgctcgcgccgcatccggcaatcaatgcctgatgcgacgctgtcgcgtcttatcaggcctacaactattgccgacctgtaggcctgataaggcacttgtgccgcatccggcaatcaatgcctgatgcgacgctgtcgcgtcttatcaggcctacaactgttgccgacctgtaggccggataaggcacttgtgccgcatccggcaatcaatgcctgatgcgacgctgtcgcgtcttatcaggcctacaactattgccgacctgtaggccggataaggcacttgtgccgcatccggcaatcaatgcctgatgcgacgctgtcgcgtcttatcaggcctacaactgttgccgacccgtaggccggataaggcgctcgcgccgcatccggcagtgtttacccgcggcgactcaaaatttctttctcataagcccgcacgctctccagccattcgctacctgctggcgtatcgtgacgttggcaatacatttcccagaccgcctgccacggcaagcttttctgctcttccagcagtgccagacgcgcagtgtaatcgcccgccgcttccagcttgcgcagctcagcggtaggttccagcaacgcacgcagcagggcttttttcatattgcgtgtaccaatgacccacgcggcaatgcggttgatagaggcatcgaagaagtcaaggccgatatgcacccggtcaaacagatcgtgacgcacaatctcactggcaattgcctgggtttcatcatccagcagcactacgtgatcgctgtcccagcgaaccggacggctgacgtgcagcagcaactgcggcacatacagcatggcggcggaaatcttgtcggaaatcacttcagtcgggtggaagtgcccggcgtccaggcacagcgcagtctggcggctggtggcataccccatgtaaaactcattggagccaaccgtgtagctctctgcgccaatgccaaacaatttgctctcaacggcgtcgatatggtgcgcagggtttagcttctcgctgatcacctcatccagtgctgccagcagacgctgacgcggggcgagacggtcaacggtgatatctttcataccatccgggatccagatgttcatcacgcttggtgtgccgagttgctcgccaaaataggcgctaacgcgacggctggctttgcagtgatcaatccagaactggcgaatgctgtcgtcggcatgggaaagcgtaaagccatcggcgcttagcggatggctaaagcaggaggggttaaaatccagaccgagctgattggctttcgcccattcaacccagtttttgaagtgctctggtttgatctggtcgcggctgactggcgtatcactttccagatagatggcatgtaaattaagccgtttcggccccggaatcagccgcatagcctgttccagatcggcacgtagctcactggcattacgcgctttgcccggataattgcctgtggcctgaatccccccggtcaggctaccttccgggttttcaaaaccggaaacatcatcgccctgccagcagtgcatactaacgggtaaacgatcaagttggcgcagcgcctcctcgacatcaatccccaccgccgcgaaacgctgtttcgctagctcccaggcctgttccagttgagtggtcatgcgcaaagctcctttgtctgtcgtgtagagtgaatctgcgccacatagtgggcaatttcactgtcaggattaggggtaaaggtggtcagattcgcggtggtgctgacgacctgacggaaatcatccacattgttgagttcatccagcgtcattaactggatgccgatattgccgagcgtgctggcttcaacaggcccggcgatcacccgaataccgcaggcatcggcgcatagctggttgagcagcgtgttctggcagcctccgccgacaatatgcagttggctgaaatcttcaccgcgcagctgcgccagctcatgcaacacatcggcatacagcagcgccagactgtcgaaaatgcagcgcgccagttcagcatcactttccgggatcggttgcgccgtttcccgacacgcagcctgaatttcgctgcacatcgtctcaggattaataaagcgatcgtcattgggattgataatgaagcggcaagccggaagtgcctgtgtcgcggagataagcgccggaagatcgttgatttgctgctcctgaagcactcgctgaagcagccataagcccataatatttttcagcacccgatagcgaccttccgccccgccttcattggtgatgttggctgccagtgccgtgtcattggtaaatggcgtctggctttcgaagcccatcaaactccaggtgccagaagagagataagcagcacgactgccgtttaacgggctggcgataaccgcgctggcggtatcatggctggcaacggcgaccactggaatctcattaccctgcgggcaaatccagtgacctatgacattacccggatgcgtcgggcgaccaaaccaggctttgttggccccgctccacgccagtaggctctcgtcccagtcgtcgctattgatattgaccagttgcgtggtcgtggcgttggtatattcccagttcatcttgccggtcaggcgataactgaagtaatccggcatcagcagagcgtgagcaatgtgtggaataagttcaggttgttgctccgtcagcgcacgcaactgataaagcgtattgaagggcagaaactggatgccgctacgttgataaatatcgcgtttgccgagttgttgttgtgcctgcgccattaggccattggtgcggctatcgcgataagcaacgggcaggcccacacgctgaccctgttggtcgagcagcacaaagtccacgccccaggtatcaatcccaatgctatcgatacgaatcccttcctcgcacaccttgtttaatccaaggcgaatggcactttcaaggctatccacatcccaggtgacatagccgttctgactatgcagcccattgttaaaacgatggatttcgcgcagcgtcaggctgcggcattcacgctcgtaacgcgccagcatcacgcgcccactggatgcgccgagatcgacggcgacacaattgcgaaaggtcataatgtgatcctgctgaatttcattacgaccagtctaaaaagcgcctgaattcgcgaccttctcgttactgacaggaaaatgggccattggcaaccagggaaagatgaacgtgatgatgttcacaatttgctgaattgtggtgatgtgatgctcaccgcatttcctgaaaattcacgctgtatcttgaaaaatcgacgttttttacgtggttttccgtcgaaaatttaaggtaagaacctgacctcgtgattactatttcgccgtgttgacgacatcaggaggccagtatgaccgtattacatagtgtggatttttttccgtctggtaacgcgtccgtggcgatagaaccccggctcccgcaggcggattttcctgaacatcatcatgattttcatgaaattgtgattgtcgaacatggcacgggtattcatgtgtttaatgggcagccctataccatcaccggtggcacggtctgtttcgtacgcgatcatgatcggcatctgtatgaacataccgataatctgtgtctgaccaatgtgctgtatcgcagcccggatcgatttcagtttctcgccgggctgaatcagttgctgccacaagagctggatgggcagtatccgtctcactggcgcgttaaccacagcgtattgcagcaggtgcgacagctggttgcacagatggaacagcaggaaggggaaaatgatttacccagcaccgccagtcgcgagatcttgtttatgcaattactgctcttgctgcgtaaaagcagtttgcaggagaacctggaaaacagcgcaagtcgtctcaacttgcttctggcctggctggaggaccattttgccgatgaggtgaattgggatgccgtggcggatcaattttctcttagtctgcgtacgctacatcggcagcttaagcagcaaacgggactgacgcctcagcgatacctgaaccgcctgcgactgatgaaagcccgacatctgctacgccacagcgaggccagcgttactgacatcgcctatcgctgtggattcagcgacagtaaccactttagcacgctttttcgccgagagtttaactggagtccgcgtgatattcgccagggacgggatggctttctgcaataacgcgaatcttctcaacgtatttgtacgccatattgcgaataatcaacttcgttctctggccgaggtagccacggtggcgcatcagttaaaacttctcaaagatgatttttttgccagcgaccagcaggcagtcgctgtggctgaccgttatccgcaagatgtctttgctgaacatacacatgatttttgtgagctggtgattgtctggcgcggtaatggcctgcatgtactcaacgatcgcccttatcgcattacccgtggcgatctcttttacattcatgctgacgataaacactcctacgcttccgttaacgatctggttttgcagaatattatttattgcccggagcgtctgaagctgaatcttgactggcagggggcgattccgggatttaacgccagcgcagggcaaccacactggcgcttaggtagcatggggatggcgcaggcgcggcaggttatcggtcagcttgagcatgaaagtagtcagcatgtgccgtttgctaacgaaatggctgagttgctgttcgggcagttggtgatgttgctgaatcgccatcgttacaccagtgatagcttgccgccaacatccagcgaaacgttgctggataagctgattacccggctggcggctagcctgaaaagtccctttgcgctggataaattttgtgatgaggcaagctgcagtgagcgcgttttgcgtcagcaatttcgccagcagactggaatgaccatcaatcaatatctgcgacaggtcagagtgtgtcatgcgcaatatcttctccagcatagccgcctgttaatcagtgatattagcaccgaatgtggctttgaagatagtaactattttagcgtggtgtttacccgggaaaccgggatgacgcccagccagtggcgtcatctcaatagccagaaagattaattcgccatgccgatgccgacgatgttagcggcgacaataatcaccacacaaccgaggctcaacaccgttaccggacggcgtcctgcattgttccactctttcagcaccagcccgacgataccgccgcacaatacatagaaactcatatgcagcatccaactgatgtagtcatactgcgccggaatgcgggcgtggccccaggcatagaaaaagaattgcagataccacatcaacccgcccagtgtgctgagtaacacattgtgaatgatcaggctttttgccaggctgaagtcggcttttaggctcaaatccttcacttttgccagacgaataaaacagaaaccgaggttaatgatcgcgccgccgcccatgatgacaacatagcttggcagagcgacatacagtggatcgacgccaagtgcggcagcggcttcatgcatcggttttgcggcgttcatcgcaaaggacatcccggcagagaaaatgccgcacatcaccgccagcaccagcccttttttcagattgaactcttcggctttaatgcccatcttgcgctctttcaactgcccggcgcgagttacaatccctacgccaatcagcgccaccagaacgccgagcaacgtcatgcgtccgccttcggtgctaatcaacacatcgaaattgccgttgataattggcgtcatcagcgtaccgacaatcaacgtaatgccaatggcgatgccaattcccatgctcatgccgagataacgcatggtcaggccgtagttgatattaccgatcccccacatagcgccgaacagaaaaacaggcagtcgcgtagagagactaaagctgctgtaatacgcccagaaattcggtagtaacagggcgctgatggcccacggcagaataatccagctaacaatcccaccgacactccacatggtttcccaactccatttttttacttttttgaacggagcgtaaaaacaggctgcactggccgcgccgatcaaatgccaaaatatccccatcgtaatcgcgttactcatcttcttatcctcatcatttttcgtcgcgtcacatctccgacgagatgagtgtaaaaatcgtgctgtcgattaacctttcgcctgttgccgccgttgtcgatttactggcaatcacggcattaagtgggtgatttgcttcacatctcgggcattttcctgcaaaaccatacccttacgaaaagtacggcattgataatcattttcaatatcatttaattaactataatgaaccaactgcttacgcggcattaacaatcggccgcccgacaatactggagatgaatatgagctataccctgccatccctgccgtatgcttacgatgccctggaaccgcacttcgataagcagaccatggaaatccaccacaccaaacaccatcagacctacgtaaacaacgccaacgcggcgctggaaagcctgccagaatttgccaacctgccggttgaagagctgatcaccaaactggaccagctgccagcagacaagaaaaccgtactgcgcaacaacgctggcggtcacgctaaccacagcctgttctggaaaggtctgaaaaaaggcaccaccctgcagggtgacctgaaagcggctatcgaacgtgacttcggctccgttgataacttcaaagcagaatttgaaaaagcggcagcttcccgctttggttccggctgggcatggctggtgctgaaaggcgataaactggcggtggtttctactgctaaccaggattctccgctgatgggtgaagctatttctggcgcttccggcttcccgattatgggcctggatgtgtgggaacatgcttactacctgaaattccagaaccgccgtccggactacattaaagagttctggaacgtggtgaactgggacgaagcagcggcacgttttgcggcgaaaaaataatcatttgccgcctgctgcaatgaggcgtataggccgcatatcagcttaaaaaatgaaccatcgccaacggcggtggtttttttgtgatcaatttcaaaataaaaacaatgatccgataaaaataaaacagcgtttcaattgatgtggttttgatcacttttattgattaaatgaatgtctatcttcgtttccatcaacactgatgctccattgaggaattacgcatcagcccttaaaaatatgccgacaggtgatggaaatgcagataaagcgcagcattgagaaaatcccggggggggatgatgctcgtcccgctattccttggcgcactgtgccacaccttcagcccgggggcggggaaatattttggaagtttcaccaacgggatgattaccggtacggtgcccattctggcggtgtggtttttttgcatgggggcgagtataaaattaagcgcgacgggaacggtactgcgtaaatccggtacgctggtggtaactaaaattgccgtcgcgtgggtggttgcggcaattgccagccgtattattccggaacatggtgttgaagttggattctttgccggacttagtacgctggcgctggtggcggcgatggatatgaccaatggcggactttacgcttccatcatgcagcagtacggcacaaaagaagaagctggggcatttgtgttgatgagcttggagtccgggccgctcatgacgatgattattctgggcactgccgggattgccagctttgaaccgcatgttttcgtcggcgcagtattaccgttcctggtgggctttgccctggggaaccttgaccctgaattgcgagaatttttcagcaaagcggtgcaaacgctgattccattctttgccttcgcgctgggcaataccattgatttgactgtgattgcccagactggtttgctggggatcctgttgggtgtggcagtaattatcgtgaccggtattccgttgattatcgccgataaattgattggcggtggcgatggcactgccggaattgccgcttccagttccgcaggggccgcggtagcgacacctgtgctgattgcagaaatggtgcctgcgtttaaaccgatggctccggcagcaactagcctggtagcgacggcggtcattgtgactagcattctggtgccaattcttacctctatctggagtcgtaaagtcaaagccagagcagcgaaaatcgaaattttaggtacggtgaaataaacctgcttccttaatccccacagccggatgaactaacgttcgtccggtttgctattgagttcctgcctggatacttaccgcgaaaacagcacgcctgacataaaataaatatggtctaatggggaaatttctcgtggagagggaacagatgcgatatccggttgatgtatacacaggcaagattcaggcttatcccgaaggcaaacccagcgcaattgctaaaatccaggttgatggtgagttgatgctgacggagctggggctggaaggtgacgagcaggcggagaaaaaggttcacggcgggccagacagagcgctgtgtcattatcctcgtgagcattatctctactgggcgcgggaatttccggaacaggcggagttgtttgttgcgcctgcgtttggtgaaaacctcagtaccgacggcctgacggaaagtaatgtttatatgggcgatattttccgctggggagaggcattaattcaggtcagccagccgcgcagcccttgctataaactcaattaccattttgatatcagcgatatagcgcagttgatgcaaaacacaggtaaggtggggtggttgtatagcgtgatagcgccagggaaagtgtctgcggacgcgccgctggagttggtttcccgtgtcagcgatgtgaccgtgcaggaggctgccgccatcgcatggcatatgccgtttgatgacgatcaatatcaccgtttactctccgctgccgggttaagcaaaagctggacgcggacgatgcaaaagcgccgactgagcggcaagatcgaagatttttcccgccggttgtggggaaaataacccccggagtgtaggcctgataagacgctatcagcgtcgcatcaggcatcctgctcaaatgccggatgcggcgtaaacgccttatcctgcctgcaaatgcgaagtttaactccgcttatacagcggcaaccaaatcaccagccgtaaaccgcccagcgggctgtcttctgccttcacccagccacgatgctgctgaatggcggtttcaacaatcgccagccccaaacctgtaccgccagattcacgatcgcgtgcttcatcggtacgatagaacggacggaaaatctgttcgcgatcttccgggctaacgccaggaccatcgtcgtccaccgtaatggtgataccgtctttatctaccgcaaagcccacttcaatcttcgtatgggaataacgcagagcattacgaacaatgttttccagcgcactttccagggcgttcggattgccgtacagcggccacggcccaggcgggaagttaactgtcaagctcttgcccatttgctcggcttcgaacgccgcgttatccagcacttcactccacaactggttggctttgatggtttcgctaaccagcgcgtttttttgctgattacgactcatcaccaacagatcgttgatcatgctgtccagacgttgcgcttcggtttcaatacgctccagttccttgctttcaccgctacgacggcgcagtaacgccgtacccagttgcagacgcgtcagcggggtgcgcagctcgtgagagatatcagaaagcagacgctgctgagaggtcatcatgcgctccagcgcggtgaccatctggttaaaactggcacctgcggcaaggaattcctgtggccccgcttccagttccgggtgctggcgtaagtttccctgggcaacttcatcggcagcgtttttcagcttacgcgccggttttgccagactccaggccaaccacaacagcagcggcgtactgaccaacatggtgacaatcagcagtaatagcgggcggtcaaacagtaagttaatgaaatcggattgagaactgctggccggacgaatcagataaagttggtaattatcttcgccatcacgcacggagaacggaccgaccagttccacgcggccatactttttcttctgcggatgatcggcgttatcggcctgaccaataaagttacgaatgatctgcatttcgctgcgttcagcgccgatcacgcggccttcggtggtcaccaataacaaacgctgtcctggcggtgcccacttatcaatcgcccggaacagacgccgccaccacattaaatcgttgggcggatcgttcgccagctccgcttcgacatgctgctcaatcatcagcccctgacgctgttcgctatccagaagctcggtcatctggcgactatcgagcttgggtaacatcaaaaccaacatcaacaccagcgccagcgtcagccagaagatggcgaagatgcgcgcggttaagctgcctatcatgaagcagaaaccatcagatattagctcaactagcagaaaccatcagatagccgcgaccacgcaaggttttaaaccacgggtgaccatctttacgatccggcagtttacgacgcaggttggaaatgtgcatatcaatagcgcggtcgaaaggcgtcaggcgtttgcccaacacttcctggcttaaatgttcacgggaaaccacctgacccagatgctgtgccagcaaatagagcagggtaaactcagtaccggttaactccagcgtttgcccgtcgaagctggcttcctgacggcctggattcagcactaaggcatcaacttccagtgtcggactaccgttgtcgttgttttgctgttgctcgctccagtggctacggcgcaggatcgcgcgaatacgtgccaccagctcacgatcattaaacggtttcgggagatagtcatctgcgcccagctcaaggccgagaacgcgatcaagttcactgccgcgcgccgtcaacataatgacaggcgtctggtgtgtctggcgaagtgcttttaatgtgtcgataccatttttcttcggcatcattacgtcaagcaaaagtaaatcaatgctgtcgtccagaagatcaagcgcctgttccccatcgtgggcaacaatcacgttgaagccttccatctcgagcagctcctttaatagggaagtcagctctcggtcatcatcaactaacaggattttattcattgtttaaatacctccgaggcagaaattacgtcatcagacgtcgctaatccatgactttacgttgttttacaccccctgacgcatgtttgcagcctgaatcgtaaactctctatcgttgaatcgcgacagaaagattttgggagcaaatgatgcgcatagttaccgctgccgtcatggccagtacgctggcagtcagtagtttaagccacgctgctgaagtcggtagtggcgataactggcatccgggtgaagaacttacgcagcgcagtacgcagagccatatgttcgacggcataagtttaaccgaacatcagcgtcagcagatgcgagatcttatgcaacaggcccggcacgaacagcctcctgttaatgttagcgaactggagacaatgcatcgccttgtcaccgcagaaaattttgatgaaaacgctgtgcgcgcacaggcagaaaaaatggcgaatgagcaaattgctcgtcaggttgagatggcaaaagtccgcaaccaaatgtatcgcctgttaacgccggagcagcaagcggttttaaacgagaaacatcaacaacgaatggagcagttgcgtgacgtgacgcaatggcaaaaaagtagtagcttgaagctattgagtagtagcaacagtcgttcccagtaataaaccctgttttccttgccatagacaccatccctgtcttcccccacatgctgtgggggtttttttatcctcaatttgcctgctgcttaatgcattgcagatgatttgcttccgttatactagcgtcagttgatagcgggagtatttatgaatcaatcttatggacggctggtcagtcgggcggcgattgctgcgacggcgatggctagcctgctattgctgattaaaatttttgcatggtggtataccgggagcgtgagtattctcgccgcgctggtggatagcctggtggatatcggcgcgagcttgacgaatttattggtggtgcgatattccctgcaacctgccgacgataatcacagctttggtcacggtaaagctgagtccctcgcggcgctggcgcaaagtatgtttatctccggtagcgcactattcctgtttttgacgggtattcaacatctgatatctccaacaccgatgacagatccaggcgtcggggttatcgtgacaattgtggcgctaatttgtacgattatccttgtcagctttcagcgttgggtggtgcggcggacgcaaagccaggcggtgcgggctgatatgctacattaccagtctgatgttatgatgaacggcgcaattctgctggcgctggggttgtcctggtacggctggcatcgcgccgatgctctgtttgcattgggaatcggcatctatattttatatagcgcgttacgcatgggatatgaggcggtacagagtttactggatcgcgcattgcctgatgaggaacggcaagaaattattgatatcgtgacttcctggccgggtgttagcggcgctcacgatcttcgcacgcggcagagtgggccgacccgctttattcagattcatttggaaatggaagactctctgcctttggttcaggcacatatggtggcggatcaggtagagcaggctattttacggcgttttccgggaagcgatgtaattatccatcaggacccctgttccgtcgtacccagggagggtaaacggtctatgcttagttaatcagtataaaagagagccagacccgcattttgtgtataaaataccgccatttggcctgacctgaatcaattcagcaggaagtgattgttatactatttgcacattcgttggatcacttcgatgtgcaagaagacttccggcaacagatttcattttgcattccaaagttcagaggtagtcatgattaagaaaatcggtgtgttgacaagcggcggtgatgcgccaggcatgaacgccgcaattcgcggggttgttcgttctgcgctgacagaaggtctggaagtaatgggtatttatgacggctatctgggtctgtatgaagaccgtatggtacagctagaccgttacagcgtgtctgacatgatcaaccgtggcggtacgttcctcggttctgcgcgtttcccggaattccgcgacgagaacatccgcgccgtggctatcgaaaacctgaaaaaacgtggtatcgacgcgctggtggttatcggcggtgacggttcctacatgggtgcaatgcgtctgaccgaaatgggcttcccgtgcatcggtctgccgggcactatcgacaacgacatcaaaggcactgactacactatcggtttcttcactgcgctgagcaccgttgtagaagcgatcgaccgtctgcgtgacacctcttcttctcaccagcgtatttccgtggtggaagtgatgggccgttattgtggagatctgacgttggctgcggccattgccggtggctgtgaattcgttgtggttccggaagttgaattcagccgtgaagacctggtaaacgaaatcaaagcgggtatcgcgaaaggtaaaaaacacgcgatcgtggcgattaccgaacatatgtgtgatgttgacgaactggcgcatttcatcgagaaagaaaccggtcgtgaaacccgcgcaactgtgctgggccacatccagcgcggtggttctccggtgccttacgaccgtattctggcttcccgtatgggcgcttacgctatcgatctgctgctggcaggttacggcggtcgttgtgtaggtatccagaacgaacagctggttcaccacgacatcatcgacgctatcgaaaacatgaagcgtccgttcaaaggtgactggctggactgcgcgaaaaaactgtattaatgatttcggaaaaaggcagattcctttaccctgaaaccgatgacagaagcaaaaatgcctgatgcgcttcgcttatcaggcctacatgaattctgcaatttattgaatttgcaaacttttgtaggccggataaggcgttcgcgccgcatccggcatggacaaagcgcactttgtcagcaatatgaggcggatttcttccgcctttttaatccctcaacatatacccgcaagttatagccaatctttttttattctttaatgtttggttaaccttctggcacgctttgctcatcacaacacaacataagagagtcgggcgatgaacaagtggggcgtagggttaacatttttgctggcggcaaccagcgttatggcaaaggatattcagcttcttaacgttagttatgatccaacgcgcgaattgtacgaacagtacaacaaggcattcagcgcccactggaaacagcaaactggtgataacgtggtgattcgtcagagtcacggtggcagtggtaaacaagcgacgagcgtaatcaacggtattgaagctgatgttgtcacgctggctctggcctatgacgtggacgcaattgcggaacgcgggcggattgataaagagtggatcaaacgtctgccggataactccgcaccgtacacttccaccattgttttcctggtacgtaagggaaatccgaagcagatccatgactggaacgatctgattaaaccgggtgttagcgtgatcacgcctaatccgaaaagctctggtggcgcgcgctggaactacctggcagcctggggctacgcgctgcatcacaacaacaacgatcaggcaaaagcacaggattttgttcgggcactgtataaaaacgtcgaagttctggattctggcgcgcgtggctccactaacacttttgtcgagcgcggaattggcgatgtactgattgcctgggaaaacgaagctctgctggcagcgaatgaactggggaaagataaattcgaaatcgtcacgccgagtgagtctatcctcgcagagccaaccgtgagcgtggtcgataaagtggtcgagaaaaaaggtactaaagaggtggcggaagcctacctgaaatatctctacagcccagaaggtcaggaaattgccgcgaaaaactactaccgtccgcgcgacgctgaggtggcgaaaaagtacgaaaatgcgtttccaaagctgaagttattcaccattgatgaagagttcggcggctggacgaaagcgcaaaaagagcattttgctaacggcggtacgttcgatcagatcagcaaacgctgatttccccaggataattatcaaacccggtggtttctcgcgaccgggttttttatttgtcacgattttgcgttacccttgcatctctttgaggtacagggaaaaaaagatgaaaaaagcgggtcttctttttttggtgatgatagttatcgccgttgtggctgccggtattggttactggaaattaaccggtgaagagagcgatacattacgtaagattgtccttgaggaatgtttgcccaatcagcagcaaaatcaaaatcctagcccatgtgcggaagtcaaacccaatgccggatacgtggttttaaaagatcttaatggcccactgcaatatctgttgatgccaacgtatcgtattaacggtactgaaagtcctttgttgaccgatcctagtacgccgaacttcttttggttggcttggcaggcgcgtgattttatgagcaaaaaatacggccagccggttcccgatcgcgcggtttctttggcgatcaactcccgcaccgggcgtacgcaaaaccattttcatattcatatctcttgtattcgtcctgatgtgcgcaaacagctggataacaatctggcgaacatcagcagccgctggttgccactgccaggtggtttgcgcgggcatgaatacctggcgcgtcgggtaacggaaagcgaactggtacaacgcagcccatttatgatgctggcagaagaagtacctgaggcgcgggaacatatgggacgctacgggctggcgatggtacggcagagtgataacagttttgtattgctggcgacacaacgaaatctactgacgcttaaccgtgctagtgccgaggaaattcaggatcatcagtgtgagattttgcgttaaggcgaagagttaaggaaagtaagtgccggatatgaaatccggcacctgtcagacttaagcctgtttagccgcttctgcagctttaacgattactgcgaaggcgtcagctttcagagaagcaccaccaaccagcgcgccgtcgatatccggctgagcaaacagttctgcagcgttagacgcgtttacagagccgccgtactgaatgatcacttgttcagcgatgttagcgtcaactttagcgatgtggtcacggatgaatttgtgaacagcctgtgcctgagccggagttgcagatttgccagtaccgattgcccatacaggttcgtaagcgataaccgcaccttcgaatgccgcagcaccctgagttttcagtaccgcgtcgatctgacgtgcgcaaacttcttcagttttgcccgcttcattttcagcttcggtttcaccgatgcacagaaccggagtcaggccctgctctttcagcaccgcgaattttttcgcgatcagttcgtcagattctttgtggtaagtacgacgttcagagtgaccgatgatgatgtactgtgcgccgatgtctttcagcatagcagcagaggtttcaccggtgaatgcgccggacaggttcaggtccacgttttgcgcacccagcatgatgtggctgccttcagcttcgcgcttcgccatatcgatatacatttccggtggtgcgattgcaaccgcacagccagcaacacctgccagctctttacgcaggttagaaaccagctcgtgaaccatgtggcggctgccgttcagtttccagttacccatcactaaaggatgtcgcattttaattctccacgcttataagcgaataaaggaagatggccgccccgcagggcagcaggtctgtgaaacagtatagagattcatcggcacaaaggctttgctttttgtcatttattcaaaccttcaaggctttcagatagcgccagcttaatcggttcaacagcgaaggtcagccccttttcgccgttgtccgcgacaacataacgcagtgcaccttctgtctcggtgtaataacgtttgtttttccccgccgttagtaggctctgcagttttttctggctttgtgttttggtcattaatggggtgagtgtgcggatcaccgctgccatgtattcctgagctttcgctttcgcggctttttgctctggcccctggatgggtagccaggtcatttgaatgcttttgatttttaaggtaccgcgctccagcgctgtagaagcatacaagttctcattaattttacttgcagcacgagtgagattggctttgtcgggactgctgtcgatggcacgaaattcgttcagtggcaggctgggattctggctgttaaagtcttctcgaaactggctgatggagagatcgaaagtaggggctccagccagcagataaggcgcggtcgttgccgtatctggtgtttgtgcatgcgcctctgttgtaacggttaatgcagaacataagagaaaaaacagcgtacaccctggcttcattgacagtaccttttgttatgactggctccgattaaaacgatatctgtcgcccttgtcaaaagggtagaatcctggaaaagacaaccatcaaggaacttacatgaccatacagcaatggttattcagttttaaagggcgtattggacgccgtgatttctggatttggataggcctgtggttcgcaggcatgctggtgcttttcagtctggcgggtaagaatctactcgatattcagaccgcggcgttttgccttgtgtgcttgctctggccaacagcggcagtaactgttaagcgcttgcatgatcgcgggcgttccggcgcatgggcatttctgatgattgtggcgtggatgctgctggcgggtaactgggcgattttaccgggtgtctggcaatgggcggtggggcgttttgtcccgacgttgattctggtgatgatgcttatcgatcttggtgcgtttgttggcacacaaggcgaaaataaatatggtaaagatactcaggatgtgaagtataaagccgacaataaaagtagtaattaacctttaatatatctcttactgctatttttttccgggattgttatttccacgatgcaaatgacaatacccggaaaatccttctgaactcttcaccttaagcaatatcaaaaaaaatggtaatccataagatcattacttgtttgttcttcccttaacggcgcattattcttaagtcgtaatcgacagagaggcgaatatacagaggtgccctatgaaagatgtcgtagataaatgcagtactaaaggatgtgcgattgatatcggtacggtgattgataacgacaactgtaccagtaagtttagccgcttttttgccacccgcgaagaagcagagtcttttatgaccaaactgaaagagcttgccgccgctacatcctctgcagatgaaggggccagcgtggcctataagattaaggatctggaggggcaagttgagcttgatgcggccttcactttcagttgccaggccgagatgattatttttgagttaagtctgcgtagcttagcttgatggagttgctttagaaggagttaaacatggcttataaacacattggcgtggcaatttccgggaatgaagaagatgccttactggtgaataaagccctggagctcgccagacataatgacgctcacctgacgttaattcatattgatgatggcttaagcgagttgtatccgggtatctacttccctgcaacagaagatattcttcaattgttgaagaataagagcgataacaagctgtataaactgacgaaaaatattcaatggccgaagacaaaactgcgtattgaacgcggagaaatgccggaaacactgctggaaattatgcaaaaagagcagtgcgacctccttgtctgtggtcatcatcacagttttatcaaccgtttgatgccggcatatcgcgggatgatcaataagatgagtgcggatttgctcatcgtgccgtttatcgataagtaaccgcttaccagtaatgctccgctgtcatatggcccggtcggcgacgtaaatgtttcgtcatctgccgggtctctttcagcaactgttgtgtatcgcgcaccatctgtggattgccgcacagcatcacatggctggtttctttattcatcggcaggccaatcgtgctttccagttccccactttcaattaatgccggtatccgtccggtgaggctccccgctgccgtttcccgactgaccaccgtctgaatgcgcagttttccttcgtagcgtttttccagttcctgcatcagtggcaaatagcttaagtcggcggcataacgtgcggcgtgcaccaggaccagatttttgaagcgatctaaatctttacctagttgcagaatgcttaaataagggccaatcgctgtaccggttgccagcatccatagcgtttcgcagtgcggcacttcatcgagcacaaagaatcctgccgcttcgctaaccacctgcacttcatcgcctggtttcagtgccgccagtcgtgggcttaatttgccatcggggacggtgaccaggtaaaactccagatcgggattatcggggctgtttacataggagtaggcgcgctggacgcgttcgccgtcgatttcaaggccaagcttggtaaattgcccggcggtaaacggaagcacgggggcgtgaacggtgagactaaacagggcgtcggtccagttctgcactttagtgactttgcctgttacccaatcagccatgtttttctcctgttttgattgacttgccttatcttcgttctccgaacaaaaaaattccagtcccgaaggactggaaggctcaatcgatcaaatcaatcagaggatgtgcacctgcatttccgggtctttgcgatccagatagtggatggactgaatgcggcgaatggtgcgactcttgccgcggatcagcagcgtttcggtagtcgcgatattgcctttgcggctaatgccttccagcagatcgcctttggtaataccggtggcagagaagatgacgttatcgctgcgcgccatatcgcccaggcgcaatactttaccggcttcgatgcccatcgctttgcagcgtgccagctcctgctcgccaatgcgacgattctcttcgttgtcgcctttgacgtcatgacgcgccagcagacgaccgttcatgtcgccatctaatgcgcggatcaccgccgcagaaactacgccttccggcgcgccaccaataccgtacagcacgtcaacttcgctgtctggcatacaggtgagaatactggccgcaacgtcgccgtccggaatagcaaatacgcgtacgccgagttgctgcatttcagcgataacggcatcgtggcgtggtttagccagaatcgttaccgtcagttcgctcaacggtttgccgagcgccgccgctacattgcgcaggttatccgccagcggcaggttcagatcaatggtgcctttggctcccggcccgacaatcagcttctccatatacatatccggcgcattgaggaagcagcctttatcgcctactgccagcaccgccagcgcgttagcctggcccatcgccgtcatgcgcgtgccttcaatcggatcaacagcaatatctaccgcgtcgccgcgaccagtaccgactttttcaccaatgtagagcatcggtgcttcgtcgatttcaccttcaccaatgacgatggtgccgtcaatgttgacctggttgagcataatacgcatggcgtttaccgccgcgccgtccgcggtgtttttatcgccgcgtcctaaccatttgtagccagccagcgccgcactttcggtgacgcgggaaaattcgatggcaagttctcgtctcatagcaaactctaagcagtaaggaatggcgcgaagtgtagcacaggggaagggagggattattgatgtgtgcggggttgcccccgcacgtttcgggactaccggatgcggcataaacgcttcattcggcatttacattattcgtcgtgttcttcccacgccatcgcgcgtttaaccgcttttttccagcctgcgtaacggtaattacgctcagtggtttcgatgcctggacggaactcgcgctcaatcaccgctttctcttgcagctcgtcgaggttctgccagaagccaaccgccaggcctgcgagataggccgcacccaatgcggtgacttcgcgcacttccgggcgctcaacgcgggtgccgagaatatcggactggaactgcatcaggaaattgtttgctactgcgccaccatccacgcgcagggcgtgcagacggataccagagtcggcctgcatcgcttccagcacgtcacgcgtctgataagcaatagactccagcgtcgcgcgtataatgtggttagcgttcaccccacgagtcagaccgaaaatcgccccgcgcgcatacgggtcccagtacggcgcacccagcccggtaaatgccggaaccacatacacaccattggtgttttgcactttggtggcgaaatattcggaatcgtaggcgtcgttaatcaacttcatttcatcgcgcagccactgaatggatgcgcctgccataaacaccgcaccttccaacgcatagttcacttcgccagtcgggccgcaggcgatggtggtcagcaggccgttttcacttttcaccgctttctcgccagtgttcatcagcataaagcagccagtgccataggtgttcttcgccatcccttctttcacgcacaactgaccaaacagcgcggcctgctggtcaccggcgatcccggagattggaatacgcgtgccgcctttgccgccaatgttagtctgaccgtatacttcggaagaacgacgcacttctggcagcatctcgcgcggaatatccagcacttccagcattttgtcgtcccagtccagggtatggatgttgaacaacatggtacgagaggcgttggtgtaatcggtcacatggacacggccctgagtcattttccagataagccacgtatcaaccgtaccaaacagcaattcaccacgacgtgcacgctcgcgagagccttccacatggtcgaggatccacttcactttggtgccagaaaagtacgggtcaatcaccagaccggtattgctgcggatataatcttctaaaccgtcacgttttaaatgctcgcagatttctgcggtacgacggcactgccagacaatggcgttatagataggcttgccggtttctttttcccagacaatagtggtttcacgctggttcgtaataccgatagctgcaatttgatcggaactgatatcggctttcgccagcacttctaccagcgtggagctttgggtggcccagatttccattgggtcgtgttctacccaacctggttttgggtagatttgctcaaattcgcgctggctcacgctaatgatattggcatcgtgatccattacgaccgcgcgggagctggtggtgccctggtcgagcgcaacgatatattttttttcagtcatgtttaattgtcccgtagtcatattacaggctagctttttgttcactaggagttgtggtttccttttcttccacaacacagatatcgcaaggcaaatggcgaccaatcagtttgcggtaggcaaatgcacctacaatcgcgccaacgatagggccgaaaagcggcaccaggaagtaaggaatgtctctgccgccggtaaaggcgacattgccccagcccgccagccaggcaaagactttcggaccgaagtcacgcgctgggttcatggcaaaacctgtcaatgggcccatagatgcgccaatgaccgcaatcagtagaccaatcagcaagggagccaaagggccgcgtggtacaccgttgccatcgtccgttaacgccaggatcagccccatcagaatagcggtaatcaccatctcaactgcgaaagcctgcacaaaattgatatgaggattagggtaagtagagaaagtgccagccagatcaacactttcaacgctgccgcgaacaatgtgatgagtctgctcgaagtcgaaaaataaattgtagtaaagcccgtaaactaaagccgcagcacagaaagcgccggcaacttgactaacgataaaaggaataactttgcgcttgtcgaaacaggcaaacagccacaatgcaatggtaacagcgggattaagatgcgcgccggaaacccctgcggtcaggtagatggccattgccacccccagtccccaaatgacactgatttcccactgaccaaaagacgcaccagcgacttttagtgctgcaacgcaacccacaccgaagaaaatcaacaacccggtaccgaggaattcagcaatgcactggcctttcaaggtacttgtttgactcataatcggatcctgaagagttaatgtttgttgtatgcgtgaaagtcacggacctccacgatgcttgtaggcatgctgtaaacttatcgttaacgagcaaaaacgagaaatatcgaacttaaaatgtgtgtgcctcgtcataaaatgagcgttatcgcgccatttattccatctgattgtacatgatgcatgtttgttagatcattcgcgcaacaaatttattaacattttcgattgatgtggattatgtcaccaggagaaggatgaaaagtgtggcaaaccgtaatctgcaaggcgtgccgctggacagcgatggcgcggcttcatacaatcggagctaactaaagtgcgctcgtatttattaaggcgtcaccggtaatcgggacgaggatttttatccatcaacgccttgcaattcaggagaggtatgacaatgagtttagaagtgtttgagaaactggaagcaaaagtacagcaggcgattgataccatcactctgttgcagatggaaatcgaagagctgaaagaaaaaaacaacagtctgagccaggaagttcaaaatgcccagcatcagcgcgaagagctggagcgtgagaacaaccatctgaaagaacagcagaacggctggcaggaacgtctgcaggccctgctgggtcgcatggaagaggtctgattacgcttcatcttccgcgtaatttctttactgtgtaggccaacaggtaacgcagaaaaaaggcaccttgcggtgcctttcttatcattcaatatccagcggatcttcactaagaataatcccggtattgtcggcataaagatggtcgccggagaagaaggtgacaccgccaaaattgacgcggacatcgctttcgccaatgccttcgccagcggcaccaaccggaattgccgccatcgcctggatgccgatatccaactcttccaggtcatctacctgacgcaccgcgccgtaaatgaccagaccttcccattcattttgtactgccagacgcgccagttcagcatcgaccagtgcgcgacgaacagaaccaccgccatcgacgacaagaacacgaccacggccattctgttcgagcagatcgtacagcaacccgttgtcctcgaaacattttaccgtgattatttgtccgccaaagctcgcccgtccgccaaagttggagaacagcggttccacgacgttaacatcttcttgatagatgtcacaaagctcggaagtatcgtatttcataggcttaacattcagttgctgcgagaattttcagtatatcgcgctatgtgggctgttggcaaaatcatcaattgttaattgatatttgtcagttatgctgcccactggcttaggaatatccctaaaacaaacagcaggttagtcagtaacgctcccttgacagtacgttccagcattggtcgcatcgccaccgggtccatttcccgcatcacataacgggcttgcttcaccagtaatggtgccgccagcaggaacagccagccccacaggctatgcaggctaaagagattaaacagcgccagacacaccaggctgcccatcagcaggcaggcatgataacgacgcgcgttcacttcacctaagcgcaccaccagcgtgtttttgccattttcgcggtcgctattgatatcacgcaggttattaatattcagtactgccgttgccagcaggccgcatgcggtcgccggaaggatcagtgccggaatcaatgtatgagcctgtaaataccagctccccatgacactcaaccagccaaagaaaaccagtacggaaatatcacccagaccgatataaccataaggacgattgcccacggtgtaggtgatagcggcaatgatgctcaacccgccaagaatcaggaaaccgacaaaatcggccagcgtatggcatgccactgcaaccagtgccagcccggagagacagatgagcacgacggtaataatgagcgcccgtttcatctcttgctgggtaatgacccctttttgcatgccgcgtagcggcccaatgcggtcaggtttatcgctgccttttaccgcatcgccgtaatcattggcgaggttagaaaggatctgtaatagcccggcggtaattagtgccagcagggcgaccagcggatcgaagtgaccttgccaccatgccagcgctgtcccgacgataattgcagcaaaggcgagggggagggttttaggtcgtaaactttccagccacgcctgagttcggctaatttgttgttcagtcataatacgcgccaataaaaatggggcctttcagccccatcaaacaatgatgaaaatgattgaacgcgattataggataaaacggctcagatcttcatctgccaccaacgcatccagatgtttgctcacataatctgcgtcaatagtgatattttgaccgcttaaatcgctggcgtcgtaggaaatctcttccattaaacgctccagaacagtgtgtaaacgacgagcaccgatgttttcggtagattcgttcacctgccatgccgcttccgcgatgcgtttaataccggagtcggtaaactcgatatttacgccttcagtcgccatcagtgctttgtactgcacggtgatagaggcattcggctcggtcagaatacgctcgaagtcgctggtggtcagcgcctgcagttcaacgcggattggcagacgaccttgcagttccgggatcaggtcagacggtttcgcaatctggaacgcgccagaagcgataaacagaatgtggtcagttttgaccatcccgtgtttggtggaaacggtgcaaccttctaccagcggcagcaggtcacgctgaacgccttcacgagaaacatccggaccggaagactcgccgcgcttacagattttgtcgatttcgtcgataaacacgatcccgtgctgctcaacagcgtcgatagcgtcttgcttcagctcttccgggttcaccagtttcgccgcttcttcttcaatcagcagcttcatggcgtctttgattttcagcttacgcgctttttgcttctggccgcccaggttctggaacatggactgcagctggctggtcatctcttccatgcccggaggagccataatttcaacgcccatcggtgctgcggcaagatcgatctcgatttctttgtcatcaagctggccttcacgcagttttttgcggaatgcctgacgagcagcggacggttcctgctgctgttcggtctgtccccagttgtttttagcaggtgggatcagcacgtcgagaatacgttcttctgccagttcttcagcgcgataacggtttttctcgatagcctggacgcgtaccattttcacggcggcatcggtcagatcgcgaataatagaatccacttccttaccgacgtagcccacttcggtgaatttggtcgcttcaactttgatgaacggcgcattcgccagcttagccagacgacgggcgatttcagttttaccgacaccggtcgggccgatcatcaggatatttttcggggtcacttcatggcgcagctcttcgttgagctgcatgcgacgccagcggttacgcagagcaatcgccacagaacgcttggcgttgtcctggccgatgatgtgcttatccagttcgctgacgatttcgcgtggggtcatttcagacatgggagatccttacgctttgtagcttaattcttcgatggtgtggaaatggttggtatagatgcaaatgtcgcctgcaatatccaacgccttttcagcaatttcacgggcgctaagttcagtgttttctaacagcgcgcgcgccgcagcctgggcgtaagggccgccggagccgatagcaataagatcgttttctggctgcaccacgtcaccgttaccggtgatgataaggcttgcagtttcatccgcgactgccagcagtgcttcaagtttgcgcagcatgcgatcggtacgccagtcttttgccagctcaacggcggctttgaccagatggccctgatgcatttccagtttacgttcaaacagttcgaacagcgtaaaagcatccgcagtaccgcccgcaaagcccgcgatgactttgtcgttgtacagacggcggacctttttcacgttgcctttcattacggtattgcccaacgtggcctgaccatcaccagcgatgaccacatggccgttacggcgtacgcttactatagttgtcacgagctgaccccttggttacgaatacagagtacaaaccccgtacaaaagtacggggcataatgcaattatagatgggggggattttgagggtttcaacccccggcggcgagccgaatgcagtttgtatgacccgccatcttcaaccgattgagggtgctgtctgcgttctctttgcctttcaccgggccaatgaccacacgattccagccattgttggtggtgattttgctgtcaaagccttcgaacgccagctgagcacgtaccgtctctgcctgttccgcgcctctgaagctaccgcactgcaccatccagcggcgttcgtcttttttctccgccgtcggttttggcgcgtcagcggcacgagcaactggcgcagcttgctgcggcttgctctgcgcagtcgtgtgcgcaggagtttgcagcagatcctggtacggctgctgagaagaagccggtttagactggcgcggttgcgcctgtaccggtgcggcttggctcgtacgcgtctgctgctgccagctttgttcagtcgtacggctctgctgagccaggcgttgctgttccgctaattgctgcgcctgacgttggcgctgtagcgtttgctgacgctgttccggcgtctgttcattccacggaacttcaaccagctgcgttggctgctggcgcatatcagcctgcatttgttcaagaagctgacgttgttctggtgtcagttgctccggcgttttcacttcaccaccggcagaaggttctgtgggcgcacgcactcccggctggcgactttccagctctttaatgtagcgccagcgttcttctggttttggtggtagtccgtttccggtcactttctggctttgcagcgtctcggactcttctttcttgtgatgcgtaatgaagtacagaccaccgataaaggtcacaagaacggcggcagcaatagcgaccatagcgggagaaaccgcaggcagatttcgttgctttttccgactggtgctcttttttcgccggctaggtgccggttggctgcggcgtacataatctcgttgtgccactatcgtttcgctgtatttattcgttcgtcagcccgccatgttacttaagcggcgggcctttgaccagtcacggcagtcttaaaggtttactttaaggtaacgcgcgtgtacttccccggatgataagttcgcagtccattaaacgagagccactgccaacgtgttgcccctgcatttgatcaagcaataacagcatagcttcccgaccgatttcgtaacgcggctgcgcgatggttgtcagcggcggatcacaaaattgcgtcaggtcgatgttatcaaaaccgattatggaaaggtcttccgggactttcagcccctggcgttttgcctgagaaagtgcgccgagcgccatcacatcgctatggcagaagacagcagtaggcggttgtggaagatcaagcagctgctgcatcgctttgcttccggcttcgaaggtgaagtcgccacgggcgatgtattgcggatcaaccataatgccgcagcgacgcagcgcctgaacatagccttgcaggcggtagtgacacagcggcatctcttcgggaccggctatacagccaatccgtttatgcccttgctcatataaataatttactgcatcaaatgcggcggtcagattgtcgatatgaactgtaggcagctccagctccggtgcaaattcgttcgccatcaccatcggcggcagattacgctgttcctcaatgctggcatcaaacggcagcctactacccagcaacaacatgccatcaatttgcttggtgatgatcaaatcgataaaggttttttcctgctgattttgatgcgcacagtcgccaatcagcaccagatatccgtgatttgccgccgtaacttcgataccgcgaataatttcgctaaagaagggatcgcagatatccgggacaatcaccagaatggtgcgggattcattacgcttgacgttgcgccccataggctgcggtaaataacccacttcccgggccgctttttcaacccgattacgggtggcctgggagactttatcgggattcattaatgctcgggagacggtcgctgtagagacttttgccttgagggcaacgtctttcatggtcgcggcagtttcctgcttcttcgctttcacactcactcctcgcctggcacgtcaggcgtactacatccatgtttacttcacatcggcaacatttttagcagatagcgcgtgaaaacggttacagaattttcatgaaaagtgtgatgaatattgaatttttcgatccgcctcgcatcgtgagcggtttaaccctcaatcggatcaacatccagcacccatttcaccttacgggaatccggtattgtattgatgagcgccagcgtaccgttaatgatgtgttgcaagcgcacgcgggaagggtgctgcaacaatatctgccagcgccagcgaccgccacgtttaggtgccagagccggaaccggaccgagaacccacagtttctcgtctgccagtgggctggagaggatcagattacgcagttgttgcaggaacaatggcgcgtgctgattgttatgatcttccgcacgcacaatcacatggctggtccacggcggtagctgcatcattcgccgctcagccagcgcctgttcggcaaaggcgtcgtagcctttatagagcaacgtttgcaacagaggatgttccggatggtgcgtttgcagcaccacttcgccctgtttacccgcacgcccggcacgaccggcgacctgggtgtaaagctgagcgaaacgctctgcgctgcgaaaatcggcagaaaacagcgcgccgtccacgtccagtaatgcaaccagcgtcacatccgggaaatggtgacctttcgccagcatttgtgtaccaatcaaaatccgcgcgccgccgcgatgtacttctgccagttgctgttccagcgcccctttgcggctggtggtatcgcggtcgatacgagaaatgggcacgccggggaacaacggcgcgagcgtctgttcaagctgttcggtgcccagccccacggggaccaggtgcgtggaaccgcaggaagggcactggcgcggcaccggacgctgactgtcacagtggtggcagcgcagatggtgctgcgcctgatgcagcgtgtagtagtgatcgcaacgtgggcattcggcaatccagccacagtcgtggcacagcagtgcaggcgcaaagccacggcggttaagaaagagaatgacctggttatcagcctgtaaatgctggcgcatacgagtgattaacgccggagccagacctgcctgcaccttctgaccttttaaatccagcacatgttgaattgccggacgcgcattccctgcccgacgggtcaggcgcagcaggcggtattttttctgctggacgttgcataacgtttccagcgcgggcgttgcggagccaagaataatcgggatttgctcgctgtgcgcacgatacaccgccaggtcgcgggcatgatagcgccagccttcctgctgcttgtaggagctgtcgtgctcttcatcaatgacaatcacgccgagatttttaaacggcgtaaacagcgcggagcgggtgccgatcacaatcgccgcctcaccatttttcgctttcagccacgcgctaagacgctcgctgtcgttcaggccggaatgcagaacttccacgggggcattaaaacgttcacgaaaacgggcgatagtttgcggtgtcaggccgatttccggcaccatcaccagcgcctgtttgccctgagcgagcacgttttccagtacgctgagataaacctccgttttaccggaaccggtaacgcccgccagcagccaggcagaaaaagtatctgccgcgctatgaattgcgccaacggcggtggcctgttcggtattcaatcgcaaccgctcaccagaaacggcatagttcgttcgccagtcgctaaactctggtgtttcacttgctaaatcacacagaccttttttgcgtagcgcctgcaacgcggcatcattaaattcgagcgtggcgacctggtcgcgccagattttgccttgccgtaacgccgccagcgcctgttgttgcttgggggagcgtttcaggctgttcagatccaccgcctggccttgttcagtggcaaaccagtaccacatcggcgcgttcgccgcaggccgcccctggcgtagtaaaatcggcaaggcatgaaacagcacatcgccaatcggatgatgatagtaatctgccgcccatagcagcaatcgccagacggagtgagtaaacaccggctcactatccagcacttcgactaccgcttttagctcattgagcggcagttcgctggcatcgctaacacttaccacaatcccgatgcgctcctgctgtttgccaaacggcacgcgcacgcgacacccagctttaaccgtcatgccttctggcagcagatagtcaaaggtacgaggaagcggaacgggcaaggcaacgtgggcaacgggcatagcatcatcctgacttgaaattcggtgggttagtatacacattgccgtagaagagtgcggatcagtttgcatacgctggttaatttctgtatgatttcgcgccttcgtacgaaatgatcgtattgaagctatacttttaacatcgcgtggtgtctggcgttagggctggaagagcgacgcggccttaaaccgaggttttcccatgaaaaaagatattcacccgaaatacgaagaaattactgctagctgctcttgcggtaacgtaatgaaaatccgctccaccgttggtcatgacctgaacctcgacgtgtgcagcaagtgccacccgttcttcactggcaaacagcgtgatgttgctaccggtggccgtgttgaccgcttcaacaagcgtttcaacatcccgggcagcaaataagaccggatttccgaaaaaagcgccgcacggcgctttttttgtgcctgaattttggtcgtattaccagctaaacagcggccattctttggcgaccgtggtgagttgtggcgcatcgaaaacggcttgtgggctgaccaccgtttcctcaagcggaatattcttgccgtaacgttctttgagctttgcctgaacttgtgggctgctcaggtcgaactctttcaacttctgctgctcgcccacgcgcattcccagcgcgttctggtaaaccttccacaccacttcgctacagtactggcgatcgtcgctccaactgaagctgaaatcatacggtttaccgagataacgttttgccgtttgcgccagtttttgctgttgttcaacactcagtccgccttcaacgcggcgaacaacgtatttgcccttttcaccatgggcgatccactgcttgagcggggtgtatttcaccgggccgactgcttcaaaaacgtagggctttttgttgcgtatcaccagcataccggtgtggctataatcggtatgggtcgccagttggatcgctttactttggctactgcgagagatctgaaagatgatgtcgccggtttgtggctgccaggcaaaggcaggtacagaaaccagcaggctgaggatcagcagcctgtttttcatagttaaacgtccatgtataaaaagcggtgggtcgcagacaacgtgctcgttgtttatgccggatgcggcgtgaacgccttatccggcctacaagttcgtgcaaattcaataaattgcaatatgacgtaggcctgataagcgtagcgcatcaggcgattccactccgcgccgctcttttttgctttagtattcccacgtctccgggttaatccccatctcacgcatgatctcttttgccgcttccgggatttcgtcgctgcgctctttacgcagatcggcatcatccggcaaaggttgcccggtaaaggcatgcagaaacgcttcgcacagcagctcgctgttggtagcgtgacgcaggttgttcacctgacgacgcgtgcgttcatcggtgaggatttttaacaccttaagaggaatggaaaccgtaatctttttgacttgttcactcttcttgccgtgctcagcgtatgggctgatatattcgccgctccattcagccatgagatacttaatcctcttcgtcaataaattgagaccagaccacacagttgatgtgggtactgaccgtaaacccgcatagtttaccgtacaggcgttaccgtgacatcgtgtaatgcacctgtcggcgtgataatgcatataattttaacggctatttgggatttgctcaatctatacgcaaagaagtttagatgtccagatgtattgacgtccattaacacaatgtttactctggtgcctgacatttcaccgacaaagcccagggaacttcatcacatgacgcgtaaacaggccaccatcgcagtgcgtagcgggttaaatgacgacgaacagtatggttgcgttgtcccaccgatccatctttccagcacctataactttaccggatttaatgaaccgcgcgcgcatgattacagccgtcgcggcaacccaacgcgcgatgtggttcagcgtgcgctggcagaactggaaggtggtgctggtgcagtacttactaataccggcatgtccgcgattcacctggtaacgaccgtctttttgaaacctggcgatctgctggttgcgccgcacgactgctacggcggtagctatcgcctgttcgacagtctggcgaaacgcggttgctatcgcgtgttgtttgttgatcaaggcgatgaacaggcattacgggcagcgctggcagaaaaacccaaactggtactggtagaaagcccaagtaatccattgttacgcgtcgtggatattgcgaaaatctgccatctggcaagggaagtcggggcggtgagcgtggtggataacaccttcttaagcccggcattacaaaatccgctggcattaggtgccgatctggtgttgcatagttgcacgaaatatctgaacggtcacagtgacgtagtggccggcgtggtgattgctaaagacccggacgttgtcactgaactggcctggtgggcaaacaatattggcgtgacgggcggcgcgtttgacagctatctgctgctacgtgggttgcgaacgctggtgccgcgtatggagctggcgcagcgcaacgcgcaggcgattgtgaaatacctgcaaacccagccgttggtgaaaaaactgtatcacccgagcttgccggaaaatcaggggcatgaaattgccgcgcgccagcaaaaaggctttggcgcaatgttgagttttgaactggatggcgatgagcagacgctgcgtcgtttcctgggcgggctgagcttgtttacgctggcggaaagtttagggggagtggaaagtttaatctctcacgccgcaaccatgacacatgcaggcatggcaccagaagcgcgtgctgccgccgggatctccgagacgctgctgcgtatctccaccggtattgaagatggcgaagatttaattgccgacctggaaaatggcttccgggctgcaaacaaggggtaaaaatgagtgtgattgcgcaggcaggggcgaaaggtcgtcagctgcataaatttggtggcagtagtctggctgatgtgaagtgttatttgcgtgtcgcgggcattatggcggagtactctcagcctgacgatatgatggtggtttccgccgccggtagcaccactaaccagttgattaactggttgaaactaagccagaccgatcgtctctctgcgcatcaggttcaacaaacgctgcgtcgctatcagtgcgatctgattagcggtctgctacccgctgaagaagccgatagcctcattagcgcttttgtcagcgaccttgagcgcctggcggcgctgctcgacagcggtattaacgacgcagtgtatgcggaagtggtgggccacggggaagtatggagcgcacgtctgatgtctgcggtacttaatcaacaagggctgccagcggcctggcttgatgcccgcgagtttttacgcgctgaacgcgccgcacaaccgcaggttgatgaagggctttcttacccgttgctgcaatagctgctggtgcaacatccgggcaaacgtctggtggtgaccggatttatcagccgcaacaacgccggtgaaacggtgctgctggggcgtaacggttccgactattccgcgacacaaatcggtgcgctggcgggtgtttctcgcgtaaccatctggagcgacgtcgccggggtatacagtgccgacccgcgtaaagtgaaagatgcctgcctgctgccgttgctgcgtctggatgaggccagcgaactggcgcgcctggcggctcccgttcttcacgcccgtactttacagccggtttctggcagcgaaatcgacctgcaactgcgctgtagctacacgccggatcaaggttccacacgcattgaacgcgtgctggcctccggtactggtgcgcgtattgtcaccagccacgatgatgtctgtttgattgagtttcaggtgcccgccagtcaggatttcaaactggcgcataaagagatcgaccaaatcctgaaacgcgcgcaggtacgcccgctggcggttggcgtacataacgatcgccagttgctgcaattttgctacaccagtgaagtggccgacagtgcgctgaaaaacctcgacgaagcgggattacctggcgaactgcgcctgcgtcaggggctggcgctggtggcgatggtcggtgcaggcgtcacccgtaacccgctgcattgccaccgcttctggcagcaactgaaaggccagccggtcgaatttacctggcagtccgatgacggcatcagcctggtggcagtactgcgcaccggcccgaccgaaagcctgattcaggggctgcatcagtccgtcttccgcgcagaaaaacgcatcggcctggtattgttcggtaagggcaatatcggttcccgttggctggaactgttcgcccgtgagcagagcacgcttagcgcacgtaccggctttgagtttgtgctggcaggtgtggtggacagccgccgcagcctgttgagctatgacgggctggacgccagccgcgcgttagccttcttcaacgatgaagcggttgagcaggatgaagagagcttgttcctgtggatgcgcgcccatccgtatgatgatttagtggtgctggacgttaccgccagccagcagcttgctgatcagtatcttgatttcgccagccacggtttccacgttatcagcgccaacaaactggcgggagccagcgacagcaataaatatcgccagatccacgacgccttcgaaaaaaccgggcgtcactggctgtacaatgccaccgtcggtgcgggcttgccgatcaaccacaccgtgcgcgatctgatcgacagcggcgatactattttgagcatcagcgggatcttctccggcacgctctcctggctgttcctgcaattcgacggtagcgtgccgtttaccgagctggtggatcaggcgtggcagcagggcttaaccgaacctgacccgcgtgacgatctctctggcaaagacgtgatgcgcaagctggtgattctggcgcgtgaagcaggttacaacatcgaaccggatcaggtacgtgtggaaagcctggtgcctgctcattgcgaaggcggcagcatcgaccatttctttgaaaatggcgatgaactgaacgagcagatggtgcaacggctggaagcggcccgcgaaatggggctggtgctgcgctacgtggcgcgtttcgatgccaacggtaaagcgcgtgtaggcgtggaagcggtgcgtgaagatcatccgttggcaagtctgctgccgtgcgataacgtctttgccatcgaaagccgctggtatcgcgataaccctctggtgatccgcggacctggcgctgggcgcgacgtcaccgccggggcgattcagagcgatatcaaccggctggcacagttgttgtaatttcagaaatttaataatgcccggtactcatgttttcgggtttatggtttctaatgaaatatattgaattatcataggattaggccggattaagcgtttacgacgaatccggcaagaagcaataagtacatggttagtttatatttgcagtccggtttgctttgcataccggattttctttttcttaccatcctgaagttttttcatcttccctgatttttcctcaccatcattggtcatttttcggttgacgcccttcggcttttccttcatctttacatctggacgtctaaacggatagatgtgcacaacacaacatataactacaagcgattgatgaggtaaggtatgagcttttttcacgccagccagcgggatgccctgaatcagagcctggcagaagtccaggggcagattaacgttagcttcgagtttttcccgccgcgtaccagtgaaatggagcagaccctgtggaactccatcgatcgccttagcagcctgaaaccgaagtttgtaagcgtgacctatggcgcgaactccggcgagcgcgaccgtacgcacagcattattaaaggcattaaagatcgcactggtctggaagcggcaccgcatcttacttgcattgatgcgacgcccgacgagctgcgcaccattgcacgcgactactggaataacggtattcgtcatatcgtggcgctgcgtggcgatctgccgccgggaagtggtaagccagaaatgtatgcttctgacctggtgacgctgttaaaagaagtggcagatttcgatatctccgtggcggcgtatccggaagttcacccggaagcaaaaagcgctcaggcggatttgcttaatctgaaacgcaaagtggatgccggagccaaccgcgcgattactcagttcttcttcgatgtcgaaagctacctgcgttttcgtgaccgctgtgtaagcgcgggcattgatgtggaaattattccgggaattttgccggtatctaactttaaacaggcgaagaaatttgccgatatgaccaacgtgcgtattccggcgtggatggcgcaaatgttcgacggtctggatgatgatgccgaaacccgcaaactggttggcgcgaatattgccatggatatggtgaagattttaagccgtgaaggagtgaaagatttccacttctatacgcttaaccgtgctgaaatgagttacgcgatttgccatacgctgggggttcgacctggtttataaatagtgtggcttttgtgaaaatcacacagtgatcacaaattttaaacagagcacaaaatgctgcctcgaaatgagggcgggaaaataaggttatcagccttgttttctccctcattacttgaaggatatgaagctaaaacccttttttataaagcatttgtccgaattcggacataatcaaaaaagcttaattaagatcaatttgatctacatctctttaaccaacaatatgtaagatctcaactatcgcatccgtggattaattcaattataacttctctctaacgctgtgtatcgtaacggtaacactgtagaggggagcacattgatgagcacgagtgacgatatccataacaccacagccactggcaaatgcccgttccatcagggcggtcacgaccagagtgcgggggcgggcacaaccactcgcgactggtggccaaatcaacttcgtgttgacctgttaaaccaacattctaatcgttctaacccactgggtgaggactttgactaccgcaaagaattcagcaaattagattactacggcctgaaaaaagatctgaaagccctgttgacagaatctcaaccgtggtggccagccgactggggcagttacgccggtctgtttattcgtatggcctggcacggcgcggggacttaccgtagtatcgatggacgcggtggcgcgggtcgtggtcagcaacgttttgcaccgctgaactcctggccggataacgtaagcctcgataaagcgcgtcgcctgttgtggccaatcaaacagaaatatggtcagaaaatctcctgggccgacctgtttatcctcgcgggtaacgtggcgctagaaaactccggcttccgtaccttcggttttggtgccggtcgtgaagacgtctgggaaccggatctggatgttaactggggtgatgaaaaagcctggctgactcaccgtcatccggaagcgctggcgaaagcaccgctgggtgcaaccgagatgggtctgatttacgttaacccggaaggcccggatcacagcggcgaaccgctttctgcggcagcagctatccgcgcgaccttcggcaacatgggcatgaacgacgaagaaaccgtggcgctgattgcgggtggtcatacgctgggtaaaacccacggtgccggtccgacaagtaatgtaggtcctgatccagaagctgcaccgattgaagaacaaggtttaggttgggcgagcacttacggcagcggcgttggcgcagatgccattacctctggtctggaagtagtctggacccagacgccgacccagtggagcaactatttcttcgagaacctgttcaagtatgagtgggtacagacccgcagcccggctggcgcaatccagttcgaagcggtagacgcaccggaaattatcccggatccgtttgatccgagcaagaaacgtaaaccgacaatgctggtgaccgacctgacgctgcgttttgatcctgagttcgagaagatctctcgtcgtttcctcaacgatccgcaggcgttcaacgaagcctttgcccgtgcctggttcaaactgacgcacagggatatggggccgaaatctcgctacatcgggccggaagtgccgaaagaagatctgatctggcaagatccgctgccgcagccgatctacaacccgaccgagcaggacattatcgatctgaaattcgcgattgcggattctggtctgtctgttagtgagctggtaagcgtggcctgggcatctgcttctaccttccgtggtggcgacaaacgcggtggtgccaacggtgcgcgtctggcattaatgccgcagcgcgactgggatgtgaacgccgcagccgttcgtgctctgcctgttctggagaaaatccagaaagagtctggtaaagccagcctggcggatatcatagtgctggctggtgtggttggtgttgagaaagccgcaagcgccgcaggtttgagcattcatgtaccgtttgcgccgggtcgcgttgatgcgcgtcaggatcagactgacattgagatgtttgagctgctggagccaattgctgacggtttccgtaactatcgcgctcgtctggacgtttccaccaccgagagtctgctgatcgacaaagcacagcaactgacgctgaccgcgccggaaatgactgcgctggtgggcggcatgcgtgtactgggtgccaacttcgatggcagcaaaaacggcgtcttcactgaccgcgttggcgtattgagcaatgacttcttcgtgaacttgctggatatgcgttacgagtggaaagcgaccgacgaaagcaaagagctgttcgaaggccgtgaccgtgaaaccggcgaagtgaaatttacggccagccgtgcggatctggtgtttggttctaactccgtcctgcgtgcggtggcggaagtttacgccagtagcgatgcccacgagaagtttgttaaagacttcgtggcggcatgggtgaaagtgatgaacctcgaccgtttcgacctgctgtaatctgaccccgttcagcggctgcttgctggcagtcgctgaacgttctttaccagcgtatagtgggcgaacgaaaactacacactggatctctcatgtctgccgcaggaaagagcaacccactggcaatcagtggcctggttgtgctcacacttatctggagttatagctggattttcatgaagcaagtcaccagttacatcggtgccttcgactttaccgccttacgctgcattttcggcgctctcgttttattcatcgtccttttattacgtggtcgcggaatgcgcccgacaccgtttaaatacaccttagccattgccctgttacaaacctgcgggatggttggtctggcgcagtgggcgttggtcagcggaggtgcggggaaggtggcgatcctgagctataccatgccgttctgggtggtgattttcgccgcgttgtttctcggtgaacgcctgcgacgtgggcaatatttcgcgattctgattgccgctttcggcttatttttggtgttgcagccgtggcaactcgatttctctagcatgaaaagtgccatgctggcaatcctctccggcgtcagttggggggcgagcgcgattgttgctaaacgtctgtatgcccgtcatccgcgcgtggatttattgagcttaacatcctggcagatgctgtatgcggcgctggtgatgagtgtggtcgctttactggtgccgcaacgtgaaattgactggcagcccaccgtgttctgggcgctggcctacagtgcgattctggcgacggcactggcgtggagcttatggttgtttgtattgaaaaacttgcctgccagtattgccagcttaagcacactggccgttcccgtttgcggcgtactcttttcctggtggctgctcggcgagaatccgggggccgttgaaggtagcggtattgtgctgattgtgctggcactggcgctggtgagccgtaagaaaaaagaagccgtcagtgtaaaaaggatctgaattttttcttcatgtggggcgatctcttatttaacaaaataacgataatgccccaccatccgccagttaaacagcacatcttcttcctgcgcgcctgcgccaatgttatgtatcaccagcggcgtaccgtcgcgggcgaagccatcactaaccaccccaatatgtgccagcccgttatccagtcgccaggagacaatatcgcccgcttgatagtcactggggttcttgctggtggggcgtgttttatcatggcggctaaaccaggtttccagattaggcacccgacggtgatcgatgttgctgtccgggcgctttaacttccatttttgcgggtactcagcaaaattcttcgccatatcttcgtgaaccagtttctgcaaatcgaccttctggctgcgcaatgcgcggatcaccacatcggaacatacaccgcgttcttgcggaacatcaccgccaggataagtaagctgcacatacgccggatcgtaaaatagcgtgctgccaatttgctgtctggcaccgtctgcgatggcaaggttggtattggcctggatttgtaccacggttggtggaacggcgggagattttaaggagtggctggtaaatgccgttagcaggctgagcagcgccagactagctttcatctggttcgtccgtgaaaataagagtcacagattcgaccttccgggctaacgattgttctgtagagaaaatgtccagaagcggataaaaaattcctgaacaacgtgggagtttcagattactggcacagagtgccggatgcggagtgaacgccttatccggcctacaaaagcacgcaaattcaatatattgcagagattgcgtaggcctgataagcgtagcgcatcaggcaattttgcgttcaaactcccggacaagccgggagtttggagtaggttattcccactcttgcaggaaacgctgaccgtactggtcggctaccagcagagcggcgtaaacctgatctggcgtcgcgccgccaggcatgttgtgaatggtttcaccttctgcacatgccgcttctgccacaattcgcattttcgccgggacatcttctttaatatccagttgagcgagagttattggcaaacctaccgcatggctaagggcagctacggtttcgatttcctccaccggcgcattttccagaaccagctgcgtcagcgtaccgaatgccactttttcaccgtgataatagtgatgcgcgtccgggatagcggtcaggccgttatgcactgcgtgcgccgcagccagaccaccactttcaaaaccaacaccgctcaaataggtgttcgcttcaatcacgcgctccagcgccggagtcactacatgctgttcggcagcaagcatcgctttttcgccttcttccagcagggtgttgtagcacagttcagccagtgccagcgcagcctgggtgcacttgccgcccgccatggtggtcgcgccgctacgagagcaggcacgcgcttcaaaccaggttgccagcgcatcgccgatacccgccgctaacagacgtgcaggtgcgccagcgacgattttggtgtcgacaatgaccatattcgggttatttggcaacagcagatagcggtcaaactcaccctcatcggtgtagataacagacaatgcgctgcacggtgcatcggtagaggcgatagtcggtgcgatcgctaccggaacacccatgaaatgtgccagtgctttggcagtatcgagggtttttccgccaccgataccgagaattgcgccacactgcgcagtctccgcgatgccacgcagacggtcgatctcattttggctacattcaccgccaaacggcgcaatttctactaccagtccagcatctttaaagcttttctcgacagtggattgagcaaaacctaaaacaaatttgtcacccaccactaaccagcgttctgccagcggcttcaggtattcgcccagacgattaatcacatcagcgccctggatgtatttacccggactttgaataatgcggtccataattgctcctttagagatgagtagtgccaaatgcggcattccagtcgtgttcgaacttctctatagcactctctaccgcaggggtgttgagcatttgttgcgctacatctaagggcagggtgatggattcacatcctgccagtaaacagtccagcgcctgacgcggcgttttaaagctggctgccagcaccatgctttctggcgcgtgcatttctaacagcgtttgcagctcctgaaccgtacgaatgccgtctccgccctgggcatctacgcggttaacatacggagcaacgtattttgcccctgccagtgcggctaataacccttgtgcggcgctatatacagcagtgccaagtgtagtaataccctcttttttcagtattttaattgctgccagaccttcggaagtcaccgggattttcaccacaatacccggaatagcgtcgcgcaggcgcttcgcttcttccaccatcccctgcgcgtcgcggctcatggtctgagcaaacagaatgccctcatcaccaatcgctttttgcagacgcggcagcacttcccatatggactccttgctggcagcgataatgctcgggttagttgtcaccccggcaatggggaatatgcgtgccagacgttcgacttctgcgacgttagcggtgtccagatacagttccatgatgtttccttttacagttccagttcatgttgcagcaggctggcgatagcgtcggcagaggcggcgttaaccagcgcgttacggaattcttcgtgcatgatgcggcgagcgaggcggctgaaaatgcgcatatgctgatcgcccgcagcgtgtttgttcagggttaacataatgatgaattgcgcttcatcatcgccccagcgcaccggcgcttgcagacgcgccacgctgatggtggattgctcaatgtgttcacttttgctgtgtggaatggcaaaactaaagcccagaccggtagagaaaacggcctcgcgcgcccacaagtcggcttccagtttacgcggatagcggcagcggcccgccagcagcaggttatcggtcatgcctttgagcacttcttctttgctgcgccagtcgctttccagtgtgatgcactcggcggtgaccagcggtgcgtcttgttgggtcatgcggaattgcgccagcaggtgttctacttccaggctagtacggcaggccattgcctggttgagcaacttgcggcactcacggctatcaagttgcgccatccgagctttcgccgccggaatacttggtgcgctcatgctgagttcatccagccctaagccgaccagcaacggcagcacggaacctttcgctcccagctcaccgcacagaccaatccatttgccctggcgatgcaccgcttgcacggcgtaatcgagcgcccgcaagaatgccggattcaggctgttgtagtgacgagtaaccttagcgttatcgcgatccaccgccagcagatactgcgtcaggtcattactaccaatactaaagaaatcaatctcttcgcagcattgatcgatgatgaacatcacgctcggcacttccagcatgatgccgagctggattttctcatcaaacggaatgtgttcgttacgtagttgctgtttggcttccgccagtttttctttcacccataagatctcttccatactggagatcatcgggatcatgattttcaggctgccgtgagcggaggcgcggaggatgctccgtagctgcgtggtaaacaagctcgcgtactcttcataaatacgcacggcgcgataaccgaggaacgggtttgcctctgcgggaatgttcagataatcaacgggtttgtcgccgccaatgtccatagtgcgcacaataatgctgcgtccgttggcggattccagcgcctgacaaaaaatgttgtacaactcgctttcgcccggtgcgctggtgcgatccatatagagcatttcagtgcggaacaaaccaacgccttccgcaccattgccgaatgcggcctgcgcttccacggagtgagcgatgttagcggcaatttcaatgcggataccgtcagcggtacgggcttgttgggtcagccagacacgctgttgctcacgcagggcgtcctgtacgcgggcttcttgctgataataacgagctacggcttcccctggctcaaccacaatcgccccggcgttgccgtcgatataaatcgtttgttgctgccacggagtaagggcatcaatatccacaccaaccagcgttggaatgttgaagctacgggcaaggatcaccgtatgactggtggtgccgccgcttttgagcaacaatcctttgaggtgatttttatccagttcgaggaactggctgggggtcagttcatcagccatacaaatggcgggctgcgtcagtttgcccggtgccgggaagcgttgctcaccgtagatttgctggagtaactggaagcagacgtcgcgtacgtccagggcacgttcttgcaggtagctgctgctggaacgggaaaactcttcgcaaaagtgattcgcgctggcaacaattgcttcggcgcagcttaatccggcgctgacgcctgccagtaaatgttcgcgcagggaagtatcgccagccagggatcggtgagcttccagaatcgcgctggtagcaccgtcgctatccagcagacgaaactcaatgtttttcagtaccagcgtcaggccgttttccagtgcggattgctcggcgtcaacgcctttggctgcgggaagattacccagcgcattgagatctaaagaagagatcggcgtcagaatgccgcctgcactaccgctgcacacggtgcgggcgcggataatttgcggattcagattggtcagactaaccggcagtggttccagttcgtcagatttaacttccgccagcggcgcatcgcagtgggggaattcatcgcgcagccattggcttaaacgctggtgcgcttcctgttcgtcggccccggaaatcagtaactggcagttatcgcccgccagcgtatcggtgccaatcagcgcaagggcgcttttggcgttgcccttgcggtcagtgcgcaggttatgccactcaatttgactactaaaagtattacacagcgtttcaacgtggcttgccggacgcgcatgtacgccgttaggtagctcacaaataaattccacaatcagggccattgcctctctcccggtacggttttctgtttacaggataagagcgcacggcaacggcctgccatgtgacaaatctgccaaaagctggacaaatgtaatgtaaccgtcaatttgcgacgcgtctcacaagacgctgttttgcggcatgcttccggtttatcgcaagttatgaggcggatcgcatttttgtactgatattacaaaagtccagtaaatggcctttttatccactgtttgctccgcctgcgattgcctattgtttcctccatcaaaaatatggacatgggctttcgcaagcccgggagcagcttatgaatgagttggtgcagatcctgaaaaatacccgtcagcatttaatgacgggcgttagtcacatgattcccttcgtggtaagcggcggtattttgctggcggtttccgtcatgttgtatggcaaaggcgcagtgccggatgccgtagccgatccaaatctgaaaaaactgtttgatatcggcgttgcgggcttgacgctgatggtgcctttcctcgcagcgtacatcggttattccattgcagagcgttctgcgctggctccgtgcgctatcggtgcctgggttggtaacagctttggtgcgggcttctttggtgcactgatcgccgggattatcggcggcatcgtggtgcattacctgaagaaaattccggtgcataaagttctgcgcagcgtgatgcctatcttcattattcctatcgtcggcacactgattaccgcaggcatcatgatgtggggcttgggcgagcctgtaggggcgttgaccaacagcctgactcagtggcttcaggggatgcagcagggcagcattgttatgctggcggtgatcatgggtctgatgctggcgttcgatatgggcggtccggttaacaaagtggcctatgccttcatgctgatttgcgttgctcagggtgtttataccgtggtggccatcgctgccgtgggtatttgtatcccgccgctggggatggggctggcgacgctgattggtcgtaaaaatttctccgcagaagagcgcgaaaccggcaaagcggcactggtgatgggctgtgttggcgttactgaaggggcgattcctttcgccgctgccgatccgctgcgtgtcattccttccatcatggtcggtagtgtttgtggtgcagtaactgcggcgctggtcggtgcgcagtgctatgcaggctggggtggtctgattgtgctgccggtggttgaaggcaagctgggttatatcgcagcagtggctgtcggagcagtggtgacggctgtttgtgtgaacgtgctgaaaagtctggcgcgtaaaaatgggtctagcactgatgaaaaagaagacgacctggatttggattttgaaattaattaattgaggaacgagccatgacgaaaattattgcagtaaccgcatgtcctagtggtgttgcccatacctatatggcagcagaggcgctggaaagtgccgcgaaagcgaaaggctgggaagtgaaagtagaaacccaggggagtattggtctggaaaatgaactgactgcggaagatgtggcgagcgctgatatggtgattctgaccaaagatatcggcatcaagtttgaagagcgttttgctggcaagaccatcgtgcgcgtcaacatcagcgatgcagtaaaacgtgctgacgccattatgagcaaaattgaagctcacctggcgcaaaccgcttaagttcttctcccgctcgcaagggcgggttcgctttcccacaggagttcctcatgacgaatcgtatctctcgcctcaaaactgcactgtttgccaatacccgtgaaatcagcctggagcgggcgctgctttataccgccagccatcggcaaaccgaaggcgaaccggtgatattgcgccgggcgaaagcaacagcgtatatccttgaacatgttgaaattagcattcgtgatgaagaactgattgccggtaaccgcaccgtaaaaccgcgcgccgggattatgagcccggaaatggacccttactggctgctgaaagagctggatcaattcccgacgcgtccgcaggaccgctttgctatcagcgaagaagataaacgtatctaccgtgaagagttgttcccgtactgggaaaaacgtagcatgaaagatttcatcaacgggcagatgacagatgaagtaaaagccgcgaccaacacgcagattttcagcatcaaccagacggataaaggccaggggcacattattattgattacccacgcctgttgaatcacgggctgggtgagctggtggcacagatgcagcaacattgtcagcaacagccggagaatcacttttatcaggccgcgttgttactgctggaagccagccagaaacacattttgcgttacgccgaactggcggaaacgatggcggcaaactgcacagatgcccagcgtcgcgaagagctgctgactattgcagagatctcccgccataacgcgcaacataagccgcagacgttctggcaggcgtgccagttattctggtacatgaacatcattctgcaatacgaatccaacgccagtagcctaagcttggggcgcttcgaccagtatatgttgccgttctatcagacaagtttaacccagggcgaagatgcggcgttcctgaaagaactgctcgaatctttatgggtgaaatgcaacgacatcgtgctgttgcgctccaccagtagcgcgcgttatttcgccggtttcccgaccggctataccgcactgctcggcgggttaaccgagaacggacgtagcgcggtgaacgtgcttagcttcctttgccttgacgcctatcaaagcgtgcaattaccgcaaccgaacctcggcgtgcgcactaacgccttgatcgacacgccgttcctgatgaaaaccgccgaaaccattcgcttcggtaccggtattccgcaaatctttaacgatgaagtggtggtgccagcgttcctcaaccgtggcgttagcctggaagatgcgcgcgactattccgtagtgggctgtgtggaattatctattcccggcagaacctacggcttgcatgacatcgcgatgtttaatctgctgaaagtgatggaaatctgcctgcatgaaaatgaaggcaatgctgcgctgacttatgaaggtttactggagcagatccgcgccaagatcagccactacatcaccctgatggttgagggcagcaatatttgtgatatcggccatcgcgactgggcacctgtaccgctgctcagtagctttatcagcgattgtctggaaaaaggccgcgatattaccgatggcggcgcgcgttataacttctccggcgtacaggggatcggtatcgccaacctgagcgattctctccatgcgttgaaagggatggtttttgagcaacagcgtttaagttttgacgaattgctgagcgtattaaaagccaacttcgcaacgccagaaggcgaaaaagtccgcgctcgcttaattaaccgcttcgagaaatacggtaacgatatcgacgaggtggataacatcagcgccgaactgttgcgccactactgcaaagaagtggaaaaataccagaacccgcgcggcggctacttcacgccgggaagctataccgtttctgctcacgtcccgttgggaagcgtggttggcgcgacgccagacggtcgttttgccggagaacagctggcagacggcggcttgagtcccatgctgggccaggacgcacaagggccaacagcggtactgaagagtgtcagtaagctcgataacacgctgctgtctaacggtacgttgctgaacgtgaaattcactccggcgaccctggaaggtgaagcaggattacgcaaactggccgacttcttacgggcgtttacccagcttaagttacaacatattcagtttaacgtggtgaacgccgacacgttgcgggaagcgcaacagcgcccacaagattatgccgggctggtggtgcgcgttgccggatacagcgccttctttgtcgaactgagcaaggagatccaggatgacatcatccgccggacagcgcatcagctgtaattaaactgtcgaaggagatccaggatgacaagttccgccggacagcgcatcagctgtaacgttgtggaaacgcgccgcgatgatgtggcgcgcattttcaacattcagcgttatagtctgaatgacggcgagggcattcgtacggtggtcttttttaaaggctgtccgcatctttgcccgtggtgtgctaatccggagagcatctccggcaaaatccagacggtacgcagagaggcgaaatgtctgcactgtgcgaaatgtttgcgtgatgcggatgaatgcccctccggggcgtttgaacggattggtcgcgatatcagccttgacgctctggaacgggaagtgatgaaagatgacattttctttcgcacgtccggcggcggcgtcacgctttctggcggcgaagtgttaatgcaggcggagtttgctacccgttttttacagcgactgcggctgtggggtgtgagttgcgccattgaaactgccggagacgcaccagccagcaagctattaccgctggcgaaattgtgcgatgaagtgttgttcgatttaaaaattatggacgcgactcaggcgcgggatgtggtgaagatgaacctgccacgcgtgctggagaatctgcgtttgctggtgagtgagggcgtcaacgtgatcccgcgtttaccgctgatccctggtttcacgctcagccgggagaatatgcagcaggcgctggatgtactgatcccgctgaatatcaggcagatccatctgttaccgtttcatcagtacggcgaaccgaaataccgcctgctggggaaaacatggagcatgaaagaggtgcctgcgccgagcagtgctgatgtggcaacgatgcgcgaaatggcagaacgggccggacttcaggttaccgtgggaggttaaaatggcatacctggtggcagtaaccgcctgcgtaagcggcgtggcgcatacttatatggcggcggaacggctggaaaagttgtgcctgttagagaagtggggagtcagcattgaaactcagggcgcgctgggaacggagaatcgtttagcggatgaggatatccgccgggcggatgttgctctgttgattacggatatcgagcttgccggtgccgagcgatttgaacattgccgctatgtgcaatgcagcatctacgcattcctgcgtgagccgcagcgggtaatgagcgcggtgcgcaaagtgctttctgcgccgcagcaaacccatcttattctggagtaattattctggagtagtcggtttttctgtcagttggctgtggtactgccggcgatattcgctcgggctgcgttcggtgtttttacgaaacagacggcagaagtagttgctgtcgacaaagccgcaggcgtgcgccacttcttttaccttcaggtcatagcctttcaataacgtcttagcgtgctccagtcgcgtgtgattcaggtattcgttaaaaccaatggcccccgttttttgaaacaggtggctgaggtaatttgggctaatataaaacgcctgtgcaacagattcgcgggtaagcgcggaggcatagcgttcgtcgatataatcgcgaatagcttcaaatagtgcctggctgcgactggcggtctggatttggctgccaagcaaatcgcggcagtggctaagcaggctggcgacgataagccttgccgtttgctgctcctgcggctgcatttgcatttcattgagcgtttgtagcagaaaagaacctatgcgtgggccgcgtcgggcgacgtgttgcttcgccagattttgatattgtttgccatcccattgcacgacgctgaagccgagttgctgtttgccaaacagcacgctaaaggtagtagcgggggcttgccattgtggaaaattccagccaccagcaggaacgtacagcacatcgccgggaactaacgttgctccagcgccggtatcaacaaactcaccttccagcacaatttccagccgtggaaaatcgacctgatacgcaagatcgggcaccgggccgttactgctggcaaagtaaatctggcgcagggacagcgggccgttgatcaggcgggagagcagatagctgacgtcgtgatacatgttattcccttaggtatgtagacgggaaaacagtaactggcattattaaaaaaggccacctgaaaagtgtggcctgaggggagttcgatgtaaacattgcggcagttgtattgccggatgtggcgtaaacgccttatccagcctaccgccgcgatctgtaggccggataagacgcgtcaagcgtcgcatccggcaaatagcgcctggctgataattactgattacccacctgatcgccatagggcagtgtgtcgtaatcgatcagtgcgtttttcttatacgggttaccaatccagcgggtagtttctttgaactgcggattcaccacactacgggttggatcgtaaccgtcgtaagataagcccgccaaatcactccaggtgtggatcagttccgccaggctgtatttacgatcaacatcctggctgaaatcacggggatgagtcgcttgccatttttcactcgtccacagcaggaacggaatggtgtacatatgacgcgtcgggttgtcctcattacgcccctgagttttgtgcggcggcgtgtcgtaaacctcttcaccgtggtcagagaaataaaccaggaaaccgttcgggtttgctgctttaaagtctttaatcaggctggcaaccacatgatcgttatacaggttagcgttgtcataatcgttataactctccagctcttccgcgtttaatcccggcggaacatgatcggtattgccatcaaacttgccctgattttccgggtagcggtatttgtatttgatatgcgtacccagcagatgaacaatgatcagtttcttcggcgcagggtcattcagcacttcctggaacggcttcagcacgttggtgtcgtattcacgcgcactctgcgtacgttgctggttcatgtagtactgcttgtcggtctggcggctaaataccgtcagcatggtattgcgggcggtcatcgtctgctggttggtgatccagaaggttttataacccgcctgtttcatcatgttcatcaggctcggctgcgtcagatacagatccgggttcttttcattggcaaaggtcagcgcctgttgcaggatttcaatggtgtacggacgagacgtaactacgttattaaacacggtcagattcggatcggttttatgcagcgcatccagctccggcgtggtttcacgcggataaccgtacagactcatgcgtccgcgctgggtgctctcgccaatcaccagcactaaagtgcgcggttcgttaccgctttcatctttgaaattagccagtggcggcaaggcattattttcattcagtaactttgttaggctgtttagttgctgacgatactgataatagccggtcaggaattgccacggtgcggcaggctccatacggctggccaggttatccaacgttttctcaaacggcttgtttttgataaacgtattcatggcgatcggatgcagaatcaagccataaagcagggcaaaagagacaacataacgccacggctttggaatatagaccgggcgcaggcgtgtccacagcagaactgccaccgccgtataggccagcgcgataagcacaattttcaggctgaaatactggcttaaatactcgctggcttcgttggtgttggtttcgaacatcacaaacagaacgctctggctgaactcctgaccgtagatgacgtagtagcacagcgccgccagagaggccgcccatagcaccacgccgattactgcggcaataattttaatccgcttcggaaagaggaataccgggatcaaccacaggctactgaataacaggctgtcgcgaatgccgttagtgccactataaccactgatgtaaataatggcctgtagcagagtagagaaaaaccaaaagtagagcagtgcccaacccagggctttccagctaaaaagaggtttagcctggacttctgtggaatgcatagtaagaacctgtcttgaaaaaatatcgccgaatgtaacgacaattccttaaggatatctgaaggtatattcagaatttgaataaaatgcagacagaaatatattgaaaacgagggtgttagaacagaagtatttcagaaaaccctcgcgcaaaagcacgagggtttgcagaagaggaagattagccggtattacgcatacctgccgcaatcccggcaatagtgaccattaacgcttgttcgacgcgaggatccggttcctggccttctttttctgcctggcgggagcggtgcagcaactcggcctgcaatacgttcagcgggtcggtgtaaatattccgtagctgaatagactctgcaatccacggcagatcggccatcagatgggaatcgttggcaatcgccagcaccactttgatgtcttcttcttgcaggttgcgtaactctttacctaacggccacagtgctttgtctaccaggcgttggtcatagtattccgccagccacaggtctgctttggcgaagaccatctccagcatgccgagacgcgtgctgaagaatggccaatcgcggcacatagcctccagctcgctctgtttgccgtcttcgaccactttttgcagcgccgtacctgcacccagccaggcggggagcatcagacggttttgcgtccaggcgaagatccacggaatggcgcgtagactctcgacgccgccggttgggcgacgtttcgccggacgactacccaacggcagtttgcccagttcttgttccggcgtagcggagcggaagtaaggcacaaaatctttgttttcacgtacgtagccgcggtagacatcgcaggagatgacactcagttcatccataatgcgacgccagctctctttcggctccggcggtggcagcaggttggcttccagaatcgccccggtataaaggctcaggctgctgacggtgatttctggcagaccatatttaaagcggatcatctcgccctgttcggttacgcgcaggccgcctttcaggcttcctggcggttgactcagcagcgccgcatgagcaggtgcgccgccgcgaccaatggaaccgccgcgaccgtggaacaacgtcagctcaatacccgctttttcgcaggttttgattaatgcatcctgtgcctgatattgcgcccaggaagctgccatcactcccgcatcttttgcactgtcggaatagccaatcatcaccatctgtttgccctgaatcaggccacgataccagtcaatattgagcagctgggtcatgacatcgttggcgttgttcagatcatcgagggtttcaaacagcggagcaaccggcatcgcaaacccgatacccgcttctttcagcagcaggtggacagccagtacgtcggacggcgttttcgccatgctgatcacgtaggcggcaatggagccttgcggtgcttcggcaatcacctggcaggtatcgagcacttcgcgcgtttcggcgcttggttgccagttgcgcggcagaagcggacgtttggagttcagttcgcggatcaggaacgcctgtttgtcggcctcactccagctttcgtagtcgccgataccgaggtagcgggtcagctcgcccagcgcttcggtatgacgcgtgctctcctgacggatatcaatacggaccagcggtacgccgaaacatttcacgcggcgcagggtgtcgagcagatcgccgttggcgataatacccatgccacacgcctgaagactctggtagcaagcgtagagcggttcccacagttcttcgttttgtgtcagcaggccttctggttttggcagttcttcgcctttcaggcgcgcttccagccatgcctgtgtcgccatcaggcgagaacgcaggtttttcatcagatagcgatacggttctgcggcaccttcttcgccaaccagcgccagcagttcaggggtcgcttcaaccatgctcagttcagaaaccagcacctgaatatctttcaggaacaaatcggtggctttccagcggctgagtagcaggacgtggcgggtgatatcggcagtgacgttcgggttgccgtcgcggtcgccgcccatccagctagtaaaacggaccggaacaaattcgacgggcagtttgtagccgaggttctcttccagttgttcgttcagttcgcgcaggtaatttggtacgccttgccacaggctgttttccactacggcaaagccccatttggcttcatctaccgggcttggacgcagcttacggatttcatcggtatgccaactctgggcgatcaactggcgcaggcgacgcatcagctggttgtgttcgtagtcagcgatatctttgttatcgagctgttttaaacaggcgttcacttccaccattttgtggatcagtgtacgacgggtaatttcggttgggtgagccgtgaggaccagttccaggctcaggctttccactgcttttttgatggtgtcttcgctcagttccggctggtttttcagtttacgcagggtgcgggcgatcacttccgggttgctggcagcttcgcctttcgggctaatgctgtggtattgctcggcggtgttggccaggttcaggaactgactaaacgcacgcgcaacgggcagcagctcgtcgttgctcaaattttgtaaggtggtgagcaactcctggcggttagcatcattgccagcgcgactagatttgctcaacttacggatagtttctacgcgttcaagaatgtgttctcccaacgcatccttgatggtttctcccagcactttgccgagcatactgacattactacgcaatgcggaatattgttcgttcatattaccccagacaccccatcttatcgtttgatagccctgtatccttcacgtcgcattggcgcgaatatgctcgggctttgcttttcgtcgtcttttataaagccacgtaaaagcggtgacgtcaaatgctgcgaaatcgcttcagcaaacgaataaatagcaggaatttacgtcattaaattcacgacgctttaaataagcgtaacttatggaaatgttaaaaaatcgccccaagtaacaccaaaggtgtaggtcggataagatgcgcaagtatcgcatccgacattattgcggcactggagtttggcaacagtgccggatgcggcgcgagcgccttatccggcctacagttgggcatcgtttgagtcactgtcggtcggataagatgcgcaagtatcgcatccgacattattgcggcactggagtttggcaacagtgccggatgcggcgcgagcgccttatccggcctacggttgggcatcgtttgagtcactgtaggtcggataagatgcgcaagcatcgcatccgacattattgcggcactggagtttggcaacagcgccggatgcggcgcgagcgccttatccggcctacgttttaatgccagcaaaaatggtgaattacctgggttatcagttcgcgggtgggcttgataaaccgtgtttccagatattcatcaggttgatgagcctgattaatactgccaggccccaacaccagcgtcgggcataacgtttgaataaacggcgcttcggtacagtagttcaccacttcggtttttgctccgagcaatttctcaaccacttcaaccagttgatgattcggtgggcattcatagccagggatcggcggatgcagctcgtcgaccgtcagacgacccggccagcgttcgctcaccggagccaatgcatcgttgagcaaaccattaagttcattgagtgtcatgccaggcagcggacgaatatccatatgcaactcacagcaagcgcaaatacggttagaagcgtcgccaccgtgaatatgcccgaggttgagcgtagggtatggcacggtaaacgcttcgtagtgataacgttctttcaggttatcgcgcaattgcaaaatatgcccgatggcgtcgtgcattagttcgatagcgttaactccgcgtgctggatcgctggagtgcccgctctggccctgaatacggatggcgttagagatatgacctttatgtgcgcgtaccggttgtagactcgtcggttcgccaatgatggcgcaatccgggcgcagggcggtagtttcggcaaaataacgcgctccggccatactggtttcttcatcagcagtcgccagaatgtagagcggttttttcagtttcgtgacgtcgacatcgcgtagcgcatcaaggataaacgcaaaaaagcctttcatgtcggcggtgcctaagccgtaaagcttgccgtcatgctccgtcagtgtaaacggatcgcgcgtccagcgaccgtcatcaaatggcaccgtatcggtatgccccgccagcaacaagccgccagccccctgtccgatacttgccagcatattgaatttgttgcgagttcctggaacaggctgcacttccacattgaagcccaaatctttaaaccagtccgccagcagagtgattaaatctgcattgctttgatcgagtgcctcttccgtggcgcttatactaggtgtggcaatcagagcgcggtaaatctcgataaatggcggtaatttgtttttcattgttgacacacctctggtcatgatagtatcaatattcatgcagtatttatgaataaaaatacactaacgttgagcgtaataaaacccaccagccgtaaggtgaatgttttacgtttaacctggcaaccagacataagaaggtgaatagccccgatgttgaatacgctgattgtgggtgccagcggctacgctggcgcagagctagtgacctatgtaaatcgccatccgcatatgaacataaccgctttgactgttagtgcgcaaagcaatgatgcgggaaagttaatctccgatttgcatccgcagctaaaaggcatcgttgatctgccgttgcagccgatgagcgatatcagcgagtttagcccaggggtggacgtagtgtttctcgccaccgcccatgaagttagccacgatttagcgccgcagtttcttgaagcgggctgcgtggtgttcgacctttccggcgcgtttcgtgttaacgacgccaccttctatgaaaaatattacggctttacccatcaatacccggaactgttggaacaggcagcctacggtctggcggagtggtgcggtaataaattaaaagaagcgaatttgattgcggtgccgggctgttatccgacggcggcacagctggcgctgaaaccgttgattgatgccgatcttcttgacctcaatcagtggccggtgatcaacgccaccagcggcgtgagcggtgcagggcgtaaagcggccattagtaacagcttttgtgaagttagcctgcaaccgtatggcgtctttactcatcgccatcaaccagagatcgccacacacctcggtgctgacgttatcttcaccccacatctgggcaatttcccgcgcggcattctcgaaaccattacctgccgcctgaaaagcggtgtgacccaggcgcaagtcgcgcaagtgttacagcaggcgtatgcccataaaccgctggtgcggctgtatgacaaaggcgttccggcgctgaaaaatgtcgttgggctgccattttgcgatatcgggtttgccgttcagggcgagcatctgattattgtggcgaccgaagacaacttactgaaaggcgcggcggcacaagcggtacagtgcgccaatattcgtttcggctatgcggaaacgcagtctcttatttaagggtgcaatgatgaatccattaattatcaaactgggcggcgtactgctggatagtgaagaggcgctggaacgtctgtttagcgcactggtgaattatcgtgagagtcatcagcgtccgctggtgattgtgcacggcggcggttgcgtggtggatgagctgatgaaagggctgaatctgccggtgaaaaagaaaaacggcctgcgggtgacgcctgctgatcagatagacattatcaccggagcactggcgggaacggcaaataaaaccctgttggcatgggcgaagaaacatcagattgcggccgtaggtttgtttctcggtgacggcgacagcgtcaaagtgacccagcttgatgaagagttaggtcatgttggactggcgcagccaggtagccctaagcttatcaactccttgctggagaacggttatctgccggtggtcagctccattggcgtaacagacgaagggcaactgatgaacgtcaatgccgaccaggcggcaacggcgctggcggcaacgctgggcgcggatctgattttgctctccgacgtcagcggcattctcgacggcaaagggcaacgcattgccgaaatgaccgccgcgaaagcagaacaactgattgagcagggcattattactgacggcatgatagtgaaagtgaacgcggcgctggatgcggcccgcacgctgggccgtccggtagatatcgcctcctggcgtcatgcggagcagcttccggcactgtttaacggtatgccgatgggtacgcggattttagcttaagttttgttggccggaggcgcagctttccggcattgaatttcaaaataaggaaacagagttatggcactttggggcgggcgttttacccaggcagcagatcaacggttcaaacaattcaacgacagtctgcgctttgattaccgtctggcggagcaggatattgttggctctgtggcctggtccaaagccctggtcacggtaggcgtgttaaccgcagaagagcaggcgcaactggaagaggcgctgaacgtgttgctggaagatgttcgcgccaggccacaacaaatccttgaaagcgacgccgaagatatccatagctgggtggaaggcaaactgatcgacaaagtgggccagttaggcaaaaagctgcataccgggcgtagccgtaatgatcaggtagcgactgacctgaaactgtggtgcaaagataccgttagcgagttactgacggctaaccggcagctgcaaagcgcgctggtggaaaccgcacaaaacaatcaggacgcggtaatgccaggttacactcacctgcaacgcgcccagccggtgacgttcgcgcactggtgcctggcctatgttgagatgctggcgcgtgatgaaagccgtttgcaggatgcgcttaagcgtctggatgtcagcccgctaggctgtggcgcgctggcgggaacggcctatgaaatcgaccgtgaacagttagcaggctggctgggctttgctagcgcgacccgtaacagtctcgacagcgtttctgaccgtgaccatgtgttggaactgctttctgctgccgctatcggcatggtgcatctgagccgttttgctgaagatctgattttctttaacaccggcgaagcggggtttgtggagctttctgaccgcgtgacttccggtagtagtttaatgccgcagaagaaaaacccggatgcgctggagctgattcgcggtaaatgcggccgggtgcagggggcgttaaccggcatgatgatgacgctgaaaggtttgccgctggcttacaacaaagatatgcaggaagacaaagaaggtctgttcgacgcgctcgatacctggctggactgcctgcatatggcggcgctggtgctggacggcattcaggtgaaacgtccacgttgccaggaagcggctcagcagggttacgccaacgccaccgaactggcggattatctggtggcgaaaggcgtaccgttccgcgaggcgcaccatattgttggtgaagcggtggtggaagccattcgtcagggcaaaccgctggaagatctgccgctcagtgagttgcagaaattcagtcaggtgattgacgaagatgtctatccgattctgagcctgcaaagctgcctcgacaagcgtgcggcaaaaggcggcgtcagtccgcagcaggtggcgcaggcgattgcttttgcgcaggctcggttagggtaagaacatttatatgtataaatttgagcctggcttatcgccgggcttttttatggcaaaaaaaagcggatcctggagatccgcaaaagttcacgttggctttagttattcgagttgagaaactctcgaaacgggcagtgacttcaagggttaaaagaggtgccgctccgtttctgtgagcaattatcagtcagaatgcttgatagggataatcgttcattgctattctacctatcgccatgaactatcgtggcgatggaggatggataatgaatattcgtgatcttgagtacctggtggcattggctgaacaccgccattttcggcgtgcggcagattcctgccacgttagccagccgacgcttagcgggcaaattcgtaagctggaagatgagctgggcgtgatgttgctggagcggaccagccgtaaagtgttgttcacccaggcgggaatgctgctggtggatcaggcgcgtaccgtgctgcgtgaggtgaaagtccttaaagagatggcaagccagcagggcgagacgatgtccggaccgctgcacattggtttgattcccacagttggaccgtacctgctaccgcatattatccctatgctgcaccagacctttccaaagctggaaatgtatctgcatgaagcacagacccaccagttactggcgcaactggacagcggcaaactcgattgcgtgatcctcgcgctggtgaaagagagcgaagcattcattgaagtgccgttgtttgatgagccaatgttgctggctatctatgaagatcacccgtgggcgaaccgcgaatgcgtaccgatggccgatctggcaggggaaaaactgctgatgctggaagatggtcactgtttgcgcgatcaggcaatgggtttctgttttgaagccggggcggatgaagatacacacttccgcgcgaccagcctggaaactctgcgcaacatggtggcggcaggtagcgggatcactttactgccagcgctggctgtgccgccggagcgcaaacgcgatggggttgtttatctgccgtgcattaagccggaaccacgccgcactattggcctggtttatcgtcctggcagtccgctgcgcagccgctatgagcagctggcagaggccatccgcgcaagaatggatggccatttcgataaagttttaaaacaggcggtttaaaccgtttaacgcagctacccgataggcttccgccatcgtcgggtagttaaaggtggtgttgacgaagtactcaatagtgttgccgccacctttctgttccataatcgcctgaccgatatgaataatttcggcagcgcgctcgccaaagcagtgaatacccagaatctcttttgtttcccgatggaacaaaattttcagcgtgcccacgttcatgccgacgatttgtgcgcgtgccagatgtttaaactgggcgcggcccacttcatatggcactttcattgcggtcagctgctgttcggttttgcccacagagctgatttccgggatggtgtaaataccggtagggatatcttcaatcagatgtgcggtggcttcgccttttaccagcgcctgcgcggcaatgcgcccctggtcataggccgcgctcgccaggctcggataaccaatcacgtcgcccaccgcgtaaacgtgtggctgtgcggtctgatacatgctgttgaccttcagctgtccgcggctgtcagtttctagcccaatgttctgtaacgccaggctatcggtattaccggtgcgaccgttggcatagagcaggcagtcagctttcagttttttaccgctcttcagatgcatgatcacaccatcgtcacagccttcgatcttctcgtactcttcgttgtgacgaatcactacgccactgttccagaagtgataggagagagaatcactcatctcttgatcgagaaatgccagcaggcgatcgcgggtgttgatcagatccacttttacatccataccgcggaagatgctcgcatattcacagccgatcactccagcaccatagataagtacatggcgcggttcgtggtgcatgctgagaatactgtcgctgtcgtaaatgcgtggatgggtgaaatcaacatctgttggatgatatggacgagagccgcaggcaataacaaatttttcagcggttagtgtttcaacgctgccgtccgggcaatccagcgccaacgtatgctcgtcaacaaagcgagcgtttccctgcaatatttcacagtgattacgttcgtaaaatccctgacgcatgcgcgtttgttgattaatcacgttatcggcatggttaaggatatcggcaaaagaagagcggagcagtcgggaatggtcgctgtaaagtgggttttgattgaattctataatgcggctgacggcgtgacggagagctttgctcgggatggtgccccagtgggtgcaaccgccgccaacattttgataacgctcgataactgcgacgcgcgcaccttgcttaaccaggcccattgcagcgccttcgccgccggggccggaacctattactatggcatcgtaatcgtaggaatgtggcatggtagggcttacctgttcttatacataaaagcaacagaatggtaacattttatcgcgggtaagccaattgatccccgtcatttatctggctatatcctgagcggcctttgctttgtctgtttcttacttttgccctgacgttttattggatttttatcgacgatactctccgtttaagcggcaggtttccgctgtacgtaaaagaaccggccaaagaattgcagtaaatatgttttattgcgttaccgttcattcacaatactggagcaatccagtatgttcattctctggtatagtgccagcagtacttttggcaaggatagtgacatcgtgatgggcgtaagagcgcaacaaaaagaaaaaacccgccgtagcctggtggaagccgcatttagccaattaagtgctgaacgcagcttcgccagcctgagtttgcgtgaagtggcgcgtgaagcgggcattgctcccacctctttttatcggcatttccgcgacgtagacgaactgggtctgaccatggttgatgagagcggtttaatgctacgccaactcatgcgccaggcgcgtcagcgtatcgccaaaggcgggagtgtgatccgcaccagcgtctccacatttatggagttcatcggtaataatcctaacgccttccggttattattgcgggaacgctccggcacctccgctgcgtttcgtgccgccgttgcgcgtgaaattcagcacttcattgcggaacttgcggactatctggaactcgaaaaccatatgccgcgtgcgtttactgaagcgcaagccgaagcaatggtgacaattgtcttcagtgcgggtgccgaggcgttggacgtcggcgtcgaacaacgtcggcaattagaagagcgactggtactgcaactgcgaatgattagcaaaggggcttattactggtatcgccgtgaacaagagaaaaccgcaattattccgggaaatgtgaaggacgagtaatgaaacaagcaaatcaagatagaggtacgctgctgctggcgttagttgctggcttaagcattaatggtactttcgcagcgctgtttagctccattgtgccattttctgtattcccgattatttccctggtgctgacggtttactgcctgcatcaacgttatcttaatcgcactatgccggtaggcttgccgggtctggcagctgcctgttttattctcggcgtactgctgtacagcacggtagttcgtgcggaatatccggatatcggctctaacttcttcccggcagtactctccgtcattatggtgttctggattggcgcgaagatgcgtaaccgtaagcaggaagttgctgagtaatcggtattatgccggatgctggcgcatccggcatgggttttacttcgcggtcagtaatacgccgcactccatatggtgcgtgtaggggaactgatcaaacagagccagacgttcgaccttgtgcgtctggcttaatgtttccagattcttgcataacgtttccgggttacaggagatgtacaaaatacgcggatacgcctgcaccattttctcggtttcactgtccagaccgctgcgcggagggtcgacaaaaatggtttcgcactgataactctttaagtcgatcccttgcaggcggttaaactcgcgcacaccattcatcgcctgagtaaattcttctgccgccatacgaataatttgtacgttatcaatatggttagctgcgatgttgtattgcgcagcagcaacgctcggcttagcgatttcggtggctaatacccgatcaaaattacgcgccagcgctaaactaaagttaccgttgccgcagtacagctccagtaaatcgcctttactgcctttggttacgtccagcgcccattccagcatctgaatattcatcgccgcgttcggctgggtaaagctgttttctacctgacggtagatcatctctttccctgcgaccggcagacgttcatcgatgtaatcctgatccagctcgattttggttttcgttgcccgaccaatcagatgcacattcagattctgcgcgcgcagtgcatcgcgcagggcctccgcttcctgacgccactcatcatccagcttcttatggtatagcagggaaaccaccgcctgattactcagtgtagtgaggtaatcaatctggaacaacttgtggcgcagaacgggattattacgcacacccgcaatcatcgccgtcatcaactggttgataagttcactggcggcggggaagctatccacgcggatgcggcttttggtttgttgatcgaaaatgatgtgatacaggtcatcgccatcgtgccagatgcggaactccgcgcgcatccggtaatgactgaccgggctgcgaaacacttccggaaccaggtcagaaaacggtgccatcatactttgcaaacgtaccactttttcggctaactgcgcttcatactgttctgttggaaggtgttcgggggtcatgatgtatcctgaaaaattaaagtacgcggcgattgtagggattgctcatcagatgtccagatcttgatgaattcctatttgtgagctacgtctggacagtaacttgttacaacctgtagcatccacttgccggtcctgtgagttaatagggaatccagtgcgaatctggagctgacgcgcagcggtaaggaaaggtgcgatgattgcgttatgcggacactgccattcggtgggaagtcatcatctcttagtatcttagatacccctccaagcccgaagacctgccggccaacgtcgcatctggttctcatcatcgcgtaatattgatgaaacctgcggcatccttcttctattgtggatgctttacaatgattaaaaaagctagcctgctgacggcgtgttccgtcacggcattttccgcttgggcacaggataccagcccggatactctcgtcgttactgctaaccgttttgaacagccgcgcagcactgtgcttgcaccaaccaccgttgtgacccgtcaggatatcgaccgctggcagagcaccagcgtcaatgatgtgctgcgccgtcttccgggcgtcgatatcacccaaaacggcggtagtggtcagctcagttctatttttattcgcggtacaaatgccagtcatgtgttggtgttaattgatggcgtacgcctgaatctggcgggggtgagtggttctgccgaccttagccagttccctattgcgcttgtccagcgtgttgaatatatccgtgggccgcgctccgctgtttatggttccgatgcaataggcggggtggtgaatatcatcacgacgcgcgatgaacccggaacggaaattagtgcagggtggggaagcaatagttatcagaactatgatgtctctacgcagcaacaactgggggataagacacgggtaacgctgttgggcgattatgcccatactcatggttatgatgttgttgcctatggtaataccggaacgcaagcgcagacagataacgatggttttttaagtaaaacgctttatggcgcgctggagcataactttactgatgcctggagcggctttgtgcgcggctatggctatgataaccgtaccaattatgacgcgtattattctcccggtagtccgttgctcgatacccgtaaactctatagccaaagttgggacgccgggctgcgctataacggcgaactgattaaaagtcaactcattaccagctatagccatagcaaagattacaactacgatccccattatggtcgttatgatagcagcgcgacgctcgatgagatgaagcaatacaccgtccagtgggcaaacaatgtcatcgttggtcacggtagtattggtgcgggtgtcgactggcagaaacagactacgacgccgggtacaggttatgttgaggatggatatgatcaacgtaataccggcatctatctgaccgggctgcaacaagtcggcgattttacctttgaaggcgcagcacgcagtgacgataacagtcagtttggtcgtcatggaacctggcaaaccagcgccggttgggaattcatcgaaggttatcgcttcattgcttcctacgggacatcttataaggcaccaaatctggggcaactgtatggcttctacggaaatccgaatctggacccggagaaaagcaaacagtgggaaggcgcgtttgaaggcttaaccgctggggtgaactggcgtatttccggatatcgtaacgatgtcagtgacttgatcgattatgatgatcacaccctgaaatattacaacgaagggaaagcgcggattaagggcgtcgaggcgaccgccaattttgataccggaccactgacgcatactgtgagttatgattatgtcgatgcgcgcaatgcgattaccgacacgccgttgttacgccgtgctaaacagcaggtgaaataccagctcgactggcagttgtatgacttcgactggggtattacttatcagtatttaggcactcgctatgataaggattacagttcttatccttatcaaaccgttaaaatgggcggtgtgagcttgtgggatcttgcggttgcgtatccggtcacctctcacctgacagttcgtggtaaaatagccaacctgttcgacaaagattatgagacagtctatggctaccaaactgcaggacgggaatacaccttgtctggcagctacaccttctgaaccacgtcccaccgtgctggtgtttgactccggcgtcggtgggttgagcgtctatgacgagatccggcatctcttaccggatctccattacatttatgctttcgataacgtcgctttcccgtatggcgaaaaaagcgaagcgtttattgttgagcgagtggtggcaattgtcaccgcggtgcaagaacgttatccccttgcgctggctgtggtcgcttgcaacactgccagtaccgttagtcttcctgcattacgcgaaaagttcgacttcccggttgttggtgtcgtgccggcgattaaacctgctgcacgtctgacggcaaatggcattgtcggattactggcaacccgcggaacagttaaacgttcttatactcatgagctgatcgcgcgtttcgctaatgaatgccagatagaaatgctgggcagcgcagagatggttgagttggctgaagcgaagctacatggcgaagatgtttctctggatgcactaaaacgtatcctacgcccgtggttaagaatgaaagagccgccagataccgttgtattgggttgcacccatttccctctactacaagaagaactgttacaagtgctgccagagggaacccggctggtggattctggcgcagcgattgctcgccgaacggcctggttgttagaacatgaagccccggatgcaaaatctgccgatgcgaatattgccttttgtatggcaatgacgccaggagctgaacaattattgcccgttttacagcgttacggcttcgaaacgctcgaaaaactggcagttttaggctgatttggttgaatgttgcgcggtcagaaaattattttaaatttcctcttgtcaggccggaataactccccataatgcgccaccactgacacggaacaacggcaaacacgccgccgggtcagcggggttctcctgagaactccggcagagaaagcaaaaataaatgcttgactctgtagcgggaaggcgtattatgcacaccccgcgccgctgagaaaaagcgaagcggcactgctctttaacaatttatcagacaatctgtgtgggcactcgaagatacggattcttaacgtcgcaagacgaaaaatgaataccaagtctcaagagtgaacacgtaattcattacgaagtttaattctttgagcgtcaaacttttaaattgaagagtttgatcatggctcagattgaacgctggcggcaggcctaacacatgcaagtcgaacggtaacaggaagaagcttgcttctttgctgacgagtggcggacgggtgagtaatgtctgggaaactgcctgatggagggggataactactggaaacggtagctaataccgcataacgtcgcaagaccaaagagggggaccttcgggcctcttgccatcggatgtgcccagatgggattagctagtaggtggggtaacggctcacctaggcgacgatccctagctggtctgagaggatgaccagccacactggaactgagacacggtccagactcctacgggaggcagcagtggggaatattgcacaatgggcgcaagcctgatgcagccatgccgcgtgtatgaagaaggccttcgggttgtaaagtactttcagcggggaggaagggagtaaagttaatacctttgctcattgacgttacccgcagaagaagcaccggctaactccgtgccagcagccgcggtaatacggagggtgcaagcgttaatcggaattactgggcgtaaagcgcacgcaggcggtttgttaagtcagatgtgaaatccccgggctcaacctgggaactgcatctgatactggcaagcttgagtctcgtagaggggggtagaattccaggtgtagcggtgaaatgcgtagagatctggaggaataccggtggcgaaggcggccccctggacgaagactgacgctcaggtgcgaaagcgtggggagcaaacaggattagataccctggtagtccacgccgtaaacgatgtcgacttggaggttgtgcccttgaggcgtggcttccggagctaacgcgttaagtcgaccgcctggggagtacggccgcaaggttaaaactcaaatgaattgacgggggcccgcacaagcggtggagcatgtggtttaattcgatgcaacgcgaagaaccttacctggtcttgacatccacggaagttttcagagatgagaatgtgccttcgggaaccgtgagacaggtgctgcatggctgtcgtcagctcgtgttgtgaaatgttgggttaagtcccgcaacgagcgcaacccttatcctttgttgccagcggtccggccgggaactcaaaggagactgccagtgataaactggaggaaggtggggatgacgtcaagtcatcatggcccttacgaccagggctacacacgtgctacaatggcgcatacaaagagaagcgacctcgcgagagcaagcggacctcataaagtgcgtcgtagtccggattggagtctgcaactcgactccatgaagtcggaatcgctagtaatcgtggatcagaatgccacggtgaatacgttcccgggccttgtacacaccgcccgtcacaccatgggagtgggttgcaaaagaagtaggtagcttaaccttcgggagggcgcttaccactttgtgattcatgactggggtgaagtcgtaacaaggtaaccgtaggggaacctgcggttggatcacctccttaccttaaagaagcgtactttgtagtgctcacacagattgtctgatagaaagtgaaaagcaaggcgtttacgcgttgggagtgaggctgaagagaataaggccgttcgctttctattaatgaaagctcaccctacacgaaaatatcacgcaacgcgtgataagcaattttcgtgtccccttcgtctagaggcccaggacaccgccctttcacggcggtaacaggggttcgaatcccctaggggacgccacttgctggtttgtgagtgaaagtcgccgaccttaatatctcaaaactcatcttcgggtgatgtttgagatatttgctctttaaaaatctggatcaagctgaaaattgaaacactgaacaacgagagttgttcgtgagtctctcaaattttcgcaacacgatgatgaatcgaaagaaacatcttcgggttgtgaggttaagcgactaagcgtacacggtggatgccctggcagtcagaggcgatgaaggacgtgctaatctgcgataagcgtcggtaaggtgatatgaaccgttataaccggcgatttccgaatggggaaacccagtgtgtttcgacacactatcattaactgaatccataggttaatgaggcgaaccgggggaactgaaacatctaagtaccccgaggaaaagaaatcaaccgagattcccccagtagcggcgagcgaacggggagcagcccagagcctgaatcagtgtgtgtgttagtggaagcgtctggaaaggcgcgcgatacagggtgacagccccgtacacaaaaatgcacatgctgtgagctcgatgagtagggcgggacacgtggtatcctgtctgaatatggggggaccatcctccaaggctaaatactcctgactgaccgatagtgaaccagtaccgtgagggaaaggcgaaaagaaccccggcgaggggagtgaaaaagaacctgaaaccgtgtacgtacaagcagtgggagcacgcttaggcgtgtgactgcgtaccttttgtataatgggtcagcgacttatattctgtagcaaggttaaccgaataggggagccgaagggaaaccgagtcttaactgggcgttaagttgcagggtatagacccgaaacccggtgatctagccatgggcaggttgaaggttgggtaacactaactggaggaccgaaccgactaatgttgaaaaattagcggatgacttgtggctgggggtgaaaggccaatcaaaccgggagatagctggttctccccgaaagctatttaggtagcgcctcgtgaattcatctccgggggtagagcactgtttcggcaagggggtcatcccgacttaccaacccgatgcaaactgcgaataccggagaatgttatcacgggagacacacggcgggtgctaacgtccgtcgtgaagagggaaacaacccagaccgccagctaaggtcccaaagtcatggttaagtgggaaacgatgtgggaaggcccagacagccaggatgttggcttagaagcagccatcatttaaagaaagcgtaatagctcactggtcgagtcggcctgcgcggaagatgtaacggggctaaaccatgcaccgaagctgcggcagcgacgcttatgcgttgttgggtaggggagcgttctgtaagcctgcgaaggtgtgctgtgaggcatgctggaggtatcagaagtgcgaatgctgacataagtaacgataaagcgggtgaaaagcccgctcgccggaagaccaagggttcctgtccaacgttaatcggggcagggtgagtcgacccctaaggcgaggccgaaaggcgtagtcgatgggaaacaggttaatattcctgtacttggtgttactgcgaaggggggacggagaaggctatgttggccgggcgacggttgtcccggtttaagcgtgtaggctggttttccaggcaaatccggaaaatcaaggctgaggcgtgatgacgaggcactacggtgctgaagcaacaaatgccctgcttccaggaaaagcctctaagcatcaggtaacatcaaatcgtaccccaaaccgacacaggtggtcaggtagagaataccaaggcgcttgagagaactcgggtgaaggaactaggcaaaatggtgccgtaacttcgggagaaggcacgctgatatgtaggtgaggtccctcgcggatggagctgaaatcagtcgaagataccagctggctgcaactgtttattaaaaacacagcactgtgcaaacacgaaagtggacgtatacggtgtgacgcctgcccggtgccggaaggttaattgatggggttagcgcaagcgaagctcttgatcgaagccccggtaaacggcggccgtaactataacggtcctaaggtagcgaaattccttgtcgggtaagttccgacctgcacgaatggcgtaatgatggccaggctgtctccacccgagactcagtgaaattgaactcgctgtgaagatgcagtgtacccgcggcaagacggaaagaccccgtgaacctttactatagcttgacactgaacattgagccttgatgtgtaggataggtgggaggctttgaagtgtggacgccagtctgcatggagccgaccttgaaataccaccctttaatgtttgatgttctaacgttgacccgtaatccgggttgcggacagtgtctggtgggtagtttgactggggcggtctcctcctaaagagtaacggaggagcacgaaggttggctaatcctggtcggacatcaggaggttagtgcaatggcataagccagcttgactgcgagcgtgacggcgcgagcaggtgcgaaagcaggtcatagtgatccggtggttctgaatggaagggccatcgctcaacggataaaaggtactccggggataacaggctgataccgcccaagagttcatatcgacggcggtgtttggcacctcgatgtcggctcatcacatcctggggctgaagtaggtcccaagggtatggctgttcgccatttaaagtggtacgcgagctgggtttagaacgtcgtgagacagttcggtccctatctgccgtgggcgctggagaactgaggggggctgctcctagtacgagaggaccggagtggacgcatcactggtgttcgggttgtcatgccaatggcactgcccggtagctaaatgcggaagagataagtgctgaaagcatctaagcacgaaacttgccccgagatgagttctccctgaccctttaagggtcctgaaggaacgttgaagacgacgacgttgataggccgggtgtgtaagcgcagcgatgcgttgagctaaccggtactaatgaaccgtgaggcttaaccttacaacgccgaagctgttttggcggatgagagaagattttcagcctgatacagattaaatcagaacgcagaagcggtctgataaaacagaatttgcctggcggcagtagcgcggtggtcccacctgaccccatgccgaactcagaagtgaaacgccgtagcgccgatggtagtgtggggtctccccatgcgagagtagggaactgccaggcatcaaataaaacgaaaggctcagtcgaaagactgggcctttcgttttatctgttgtttgtcggtgaacgctctcctgagtaggacaaatccgccgggagcggatttgaacgttgcgaagcaacggcccggagggtggcgggcaggacgcccgccataaactgccaggcatcaaattaagcagaaggccatcctgacggatggcctttttgcgtttctacaaactcttcctgtcgtcatatctacaagccatccccccacagatacggtaaactagcctcgtttttgcatcaggaaagcagctatgaaccactccttaaaaccctggaacacatttggcattgatcataatgctcagcacattgtatgtgccgaagacgaacaacaattactcaatgcctggcagtatgcaaccgcagaaggacaacccgttcttattctgggtgaaggaagtaatgtactttttctggaggactatcgcggcacggtgatcatcaaccggatcaaaggtatcgaaattcatgatgaacctgatgcgtggtatttacatgtaggagccggagaaaactggcatcgtctggtaaaatacactttgcaggaaggtatgcctggtctggaaaatctggcattaattcctggttgtgtcggcagtagtcctatccagaatattggtgcttatggcgtagaattacagcgagtttgcgcttatgttgattctgttgaactggcgacaggcaagcaagtgcgcttaactgccaaagagtgccgttttggctatcgcgacagtatttttaaacatgaataccaggaccgcttcgctattgtagccgtaggtctgcgtctgccaaaagagtggcaacctgtactaacgtatggtgacttaactcgtctggatcctacaacagtaacgccacagcaagtatttaatgcggtgtgtcatatgcgcaccaccaaactccctgatccaaaagtgaatggcaatgccggtagtttcttcaaaaaccctgttgtatctgccgaaacggctaaagcattactgagtcaatttccaacagcaccaaattacccccaggcggatggtagtgtaaaactggcagcaggttggcttatcgatcagtgccagctaaaagggatgcaaataggtggggctgcggtgcaccgtcaacaggcgttagttctcattaatgaagacaatgcaaaaagcgaagatgttgtacagctggcgcatcatgtaagacagaaagttggtgaaaaatttaatgtctggcttgagcctgaagtccgctttattggtgcaagtggtgaagtgagcgcagtggagacaattagttgaaataaagcgcagtggagacaatttcatgaaggataacaccgtgccactgaaattgattgccctgttagcgaacggtgaatttcactctggcgagcagttgggtgaaacgctgggaatgagccgggcggctattaataaacacattcagacactgcgtgactggggcgttgatgtctttaccgttccgggtaaaggatacagcctgcctgagcctatccagttacttaatgctaaacagatattgggtcagctggatggcggtagtgtagccgtgctgccagtgattgactccacgaatcagtaccttcttgatcgtatcggagagcttaaaagcggcgatgcttgcattgcagaataccagcaggctggccgtggtcgccggggtcggaaatggtttagcccttttggcgcaaacttatatttgagcatgttctggcgtctggaacaaggcccggcggcggcgattggtttaagtctggttatcggtatcgtgatggcggaagtattacgcaagctgggtgcagataaagttcgtgttaaatggcctaatgacctctatctgcaggatcgcaagctggcaggcattctggtggagctgactggcaaaactggcgatgcggcgcaaatagtcattggagccgggatcaacatggcaatgcgccgtgttgaagagagtgtcgttaatcaggggtggatcacgctgcaggaagcggggatcaatctcgatcgtaatacgttggcggccatgctaatacgtgaattacgtgctgcgttggaactcttcgaacaagaaggattggcaccttatctgagccgctgggaaaagctggataattttattaatcgcccagtgaaacttatcattggtgataaagaaatatttggcattagtcgcggaatagacaaacagggggctttattacttgagcaggatggaataataaaaccctggatgggcggtgaaatatccctgcgtagtgcagaaaaataagaaaggggagtattcgctcccctgcaaattatttgcgtagtctgacctcttctaccgcatgattagcacttttcgtcaggattaaactggcgcgctcacgagtaggtagaatattttgctttaagttcagccagttgatctctttccacaatgtcatggcagtcttaatcgcttcttctttagttaatttcgcgtagttatgaaaataggaatccgggtcggtaaaagccccttcgcggaatttcagaaaacggttgatataccatgtctgaagtaagtcttccggtgcatcaacatatatgctaaaatcgacaaaatcagaaacaaatacatgatgtggatcgtgtggataatccatcccgctctgtaagacatttaacccttcaagaattaaaatatcaggctgaacaaccgttttatctccatccgggatcacatcataaataagatgactgtaaacaggtgctgtaacgtttggcacgccggatttgagatcggaaacaaacttcaccaggcgatgcatatcatagctttccgggaagcctttcttcttcatcagaccacgttctttcagaacctgattagggtgaaggaagccatctgtagtgatcagttcaacacgacgatgttccggccaacggcttaatagcgcctgcaatacacgggcggttgtacttttccccaccgcgacactgccagcaatactgataatgtaaggaatgcgttgcccgttggtaccaagaaactgttccagaactgcctgacggcgcagattgctgcttatatagaagttcagcaaacgactcaaaggtaaatagatctcggcaacttcttctaagctgagatcttcattaatacctttgagacgggcgatctcatcttcgcttaacgtcataggtacggaatcacgcagagctgcccactggttgcggtcaaactgtaggtaaggcgtcattaacgtttgctcttttatactcataagcatgtttctggcggtcatagctctatcggcaaagcgatatttgccatggcgcgtcacagttctgttgaatgggttaatgggcaggagggtaacaccagatggggaggaataataagaaaaaatctctgccaggaagctatcgttgaaaagcaatgtgacagatattccatctgataaaaagaattatggtttagcaggagcgcattgttgagcacaatgatgttgaaaaagtgtgctaatctgccctccgttcggctgtttcttcatcgtgtcgcataaaatgtgaccaataaaacaaattatgcaattttttagttgcatgaactcgcatgtctccatagaatgcgcgctacttgatgccgacttagctcagtaggtagagcaactgacttgtaatcagtaggtcaccagttcgattccggtagtcggcaccatcaagtccggtggggttcccgagcggccaaagggagcagactgtaaatctgccgtcacagacttcgaaggttcgaatccttcccccaccaccaatttcggccacgcgatggcgtagcccgagacgataagttcgcttaccggctcgaataaagagagcttctctcgatattcagtgcagaatgaaaatcaggtagccgagttccaggatgcgggcatcgtataatggctattacctcagccttccaagctgatgatgcgggttcgattcccgctgcccgctccaagatgtgctgatatagctcagttggtagagcgcacccttggtaagggtgaggtcggcagttcgaatctgcctatcagcaccacttcttttctcctccctgttttttccttctgtttattgcattcaacaagtcgggcatgttgcctggttgatgtggtgatatcaccgatttatccgtgtcttagagggacaatcgatgtctaaagaaaagtttgaacgtacaaaaccgcacgttaacgtcggtactatcggccacgttgaccatggtaaaacaacgctgaccgctgcaatcactaccgtactggctaaaacctacggcggtgctgctcgcgcattcgaccagatcgataacgcgccggaagaaaaagctcgtggtatcaccatcaacacttctcacgttgaatacgacaccccgacccgccactacgcacacgtagactgcccggggcacgccgactatgttaaaaacatgatcaccggtgctgcgcagatggacggcgcgatcctggtagttgctgcgactgacggcccgatgccgcagactcgtgagcacatcctgctgggtcgtcaggtaggcgttccgtacatcatcgtgttcctgaacaaatgcgacatggttgatgacgaagagctgctggaactggttgaaatggaagttcgtgaacttctgtctcagtacgacttcccgggcgacgacactccgatcgttcgtggttctgctctgaaagcgctggaaggcgacgcagagtgggaagcgaaaatcctggaactggctggcttcctggattcttacattccggaaccagagcgtgcgattgacaagccgttcctgctgccgatcgaagacgtattctccatctccggtcgtggtaccgttgttaccggtcgtgtagaacgcggtatcatcaaagttggtgaagaagttgaaatcgttggtatcaaagagactcagaagtctacctgtactggcgttgaaatgttccgcaaactgctggacgaaggccgtgctggtgagaacgtaggtgttctgctgcgtggtatcaaacgtgaagaaatcgaacgtggtcaggtactggctaagccgggcaccatcaagccgcacaccaagttcgaatctgaagtgtacattctgtccaaagatgaaggcggccgtcatactccgttcttcaaaggctaccgtccgcagttctacttccgtactactgacgtgactggtaccatcgaactgccggaaggcgtagagatggtaatgccgggcgacaacatcaaaatggttgttaccctgatccacccgatcgcgatggacgacggtctgcgtttcgcaatccgtgaaggcggccgtaccgttggcgcgggcgttgtagcaaaagttctgagctaattgccgataacatttgacgcaatgcgcactaaaagggcatcatttgatgccctttttgcacgctttcgtaccagaacctggctcatcagtgattttctttgtcataatcattgctgagacaggctctgttgagggcgtataatccgaaaagctaatacgcgtttcgatttggtttgcctcgcgatcgcggggtgaaaatgtttgtagaaaacttctgacaggttggtttatgagtgcgaataccgaagctcaaggaagcgggcgcggcctggaagcgatgaagtgggtcgttgtggtggcattgctcctggtggcgattgtcggcaactatctttatcgcgacattatgctgccgctgcgtgcgctggccgtagtaattctgattgctgcagcgggtggtgtcgcgctgttaacgacaaaaggtaaagctaccgttgcttttgcccgtgaagcgcgtaccgaagtccgtaaggtcatttggccgactcgccaggaaacattgcacaccacgctgattgtggctgcggttaccgcagtaatgagtctgatcctgtggggactggatggtattctggttcgcctggtatcctttatcactggcctgaggttctgagatgtctgaagctcctaaaaagcgctggtacgtcgttcaggcgttttccggttttgaaggccgcgtagcaacgagcctgcgtgagcatatcaaattacacaacatggaagatttgtttggtgaagtcatggtaccaaccgaagaagtggttgaaatccgtggcggtcagcgtcgcaaaagcgaacgtaaattcttccctggctacgtcctcgttcagatggtgatgaacgacgcgagctggcacctggtgcgcagcgtaccgcgtgtgatgggcttcatcggcggtacttccgatcgtcctgcgccaatcagcgataaagaagtcgatgcgattatgaaccgcctgcagcaggttggtgataagccgcgtccgaaaacgctgtttgaaccgggtgaaatggtccgtgttaatgatggtccgttcgctgacttcaacggtgttgttgaagaagtggattacgagaaatctcgtctgaaagtgtctgtttctatcttcggtcgtgcgaccccggtagagctggacttcagccaggttgaaaaagcctaacccagcgatcaaaaaagcggcgatttaatcgttgcacaaggcgtgagattggaatacaatttcgcgccttttgtttttatgggccttgcccgtaaaacgattttttatatcacggggagcctctcagaggcgttattacccaacttgaggaatttataatggctaagaaagtacaagcctatgtcaagctgcaggttgcagctggtatggctaacccgagtccgccagtaggtccggctctgggtcagcagggcgtaaacatcatggaattctgcaaagcgttcaacgcaaaaactgattccatcgaaaaaggtctgccgattccggtagtaatcaccgtttacgctgaccgttctttcactttcgttaccaagaccccgccggcagcagttctgctgaaaaaagcggctggtatcaagtctggttccggtaagccgaacaaagacaaagtgggtaaaatttcccgcgctcagctgcaggaaatcgcgcagaccaaagctgccgacatgactggtgccgacattgaagcgatgactcgctccatcgaaggtactgcacgttccatgggcctggtagtggaggactaagaaatggctaaactgaccaagcgcatgcgtgttatccgcgagaaagttgatgcaaccaaacagtacgacatcaacgaagctatcgcactgctgaaagagctggcgactgctaaattcgtagaaagcgtggacgtagctgttaacctcggcatcgacgctcgtaaatctgaccagaacgtacgtggtgcaactgtactgccgcacggtactggccgttccgttcgcgtagccgtatttacccaaggtgcaaacgctgaagctgctaaagctgcaggcgcagaactggtaggtatggaagatctggctgaccagatcaagaaaggcgaaatgaactttgacgttgttattgcttctccggatgcaatgcgcgttgttggccagctgggccaggttctgggtccgcgcggcctgatgccaaacccgaaagtgggtactgtaacaccgaacgttgctgaagcggttaaaaacgctaaagctggccaggttcgttaccgtaacgacaaaaacggcatcatccacaccaccatcggtaaagtggactttgacgctgacaaactgaaagaaaacctggaagctctgctggttgcgctgaaaaaagcaaaaccgactcaggcgaaaggcgtgtacatcaagaaagttagcatctccaccaccatgggtgcaggtgttgcagttgaccaggctggcctgagcgcttctgtaaactaatgcctttacgtgggcggtgattttgtctacaatcttacccccacgtataatgcttaatgcagacgtatatccgagatattcgggttgtggcaaggcggcaactgagtgagtcgccaggagcatagctaactatgtgactggtgcgaatgaaggaagccaacgccgtcacaagctgaatagcgacggatagaaaagatttgttcgttggagcctggcctatccaggcctccgtcgaagaccgcaggagtttcgcaagaaacttaatcccctgcgtagacggtgacagaacgctaagattattcttttatattctggcttgtttctgctcaccgtaattaagacgctctctccgtttggaggagtgaagtgagttccagagattttctctggcaaacatccaggagcaaagctaatggctttaaatcttcaagacaaacaagcgattgttgctgaagtcagcgaagtagccaaaggcgcgctgtctgcagtagttgcggattcccgtggcgtaactgtagataaaatgactgaactgcgtaaagcaggtcgcgaagctggcgtatacatgcgtgttgttcgtaacaccctgctgcgccgtgctgttgaaggtactccgttcgagtgcctgaaagacgcgtttgttggtccgaccctgattgcatactctatggaacacccgggcgctgctgctcgtctgttcaaagagttcgcgaaagcgaatgcaaaatttgaggtcaaagccgctgcctttgaaggtgagctgatcccggcgtctcagatcgaccgcctggcaactctgccgacctacgaagaagcaattgcacgcctgatggcaaccatgaaagaagctagcgctggcaaactggttcgtactctggctgctgtacgcgatgcgaaagaagctgcttaatcgcagttatctttttaacgcattcgcttacgtataaacttattctgatattcaggaacaatttaaatgtctatcactaaagatcaaatcattgaagcagttgcagctatgtctgtaatggacgttgtagaactgatctctgcaatggaagaaaaattcggtgtttccgctgctgctgctgtagctgtagctgctggcccggttgaagctgctgaagaaaaaactgaattcgacgtaattctgaaagctgctggcgctaacaaagttgctgttatcaaagcagtacgtggcgcaactggcctgggtctgaaagaagctaaagacctggtagaatctgcaccggctgctctgaaagaaggcgtgagcaaagacgacgcagaagcactgaaaaaagctctggaagaagctggcgctgaagttgaagttaaataagccaacccttccggttgcagcctgagaaatcaggctgatggctggtgactttttagtcaccagcctttttgcgctgtaaggcgccagtagcgtttcacactgtttgactactgctgtgcctttcaatgcttgtttctatcgacgacttaatatactgcgacaggacgtccgttctgtgtaaatcgcaatgaaatggtttaagcgtgatagcaacaggcattgcggaaagtgttccattttccggtcaacaaaatagtgttgcacaaactgtccgctcaatggacagatgggtcgacttgtcagcgagctgaggaaccctatggtttactcctataccgagaaaaaacgtattcgtaaggattttggtaaacgtccacaagttctggatgtaccttatctcctttctatccagcttgacagctttcagaaatttatcgagcaagatcctgaagggcagtatggtctggaagctgctttccgttccgtattcccgattcagagctacagcggtaattccgagctgcaatacgtcagctaccgccttggcgaaccggtgtttgacgtccaggaatgtcaaatccgtggcgtgacctattccgcaccgctgcgcgttaaactgcgtctggtgatctatgagcgcgaagcgccggaaggcaccgtaaaagacattaaagaacaagaagtctacatgggcgaaattccgctcatgacagacaacggtacctttgttatcaacggtactgagcgtgttatcgtttcccagctgcaccgtagtccgggcgtcttctttgactccgacaaaggtaaaacccactctagcggtaaagtgctgtataacgcgcgtatcatcccttaccgtggttcctggctggacttcgaattcgatccgaaggacaacctgttcgtacgtatcgaccgtcgccgtaaactgcctgcgaccatcattctgcgcgccctgaactacaccacagagcagatcctcgacctgttctttgaaaaagttatctttgaaatccgtgataacaagctgcagatggaactggtgccggaacgcctgcgtggtgaaaccgcatcttttgacatcgaagctaacggtaaagtgtacgtagaaaaaggccgccgtatcactgcgcgccacattcgccagctggaaaaagacgacgtcaaactgatcgaagtcccggttgagtacatcgcaggtaaagtggttgctaaagactatattgatgagtctaccggcgagctgatctgcgcagcgaacatggagctgagcctggatctgctggctaagctgagccagtctggtcacaagcgtatcgaaacgctgttcaccaacgatctggatcacggcccatatatctctgaaaccttacgtgtcgacccaactaacgaccgtctgagcgcactggtagaaatctaccgcatgatgcgccctggcgagccgccgactcgtgaagcagctgaaagcctgttcgagaacctgttcttctccgaagaccgttatgacttgtctgcggttggtcgtatgaagttcaaccgttctctgctgcgcgaagaaatcgaaggttccggtatcctgagcaaagacgacatcattgatgttatgaaaaagctcatcgatatccgtaacggtaaaggcgaagtcgatgatatcgaccacctcggcaaccgtcgtatccgttccgttggcgaaatggcggaaaaccagttccgcgttggcctggtacgtgtagagcgtgcggtgaaagagcgtctgtctctgggcgatctggataccctgatgccacaggatatgatcaacgccaagccgatttccgcagcagtgaaagagttcttcggttccagccagctgtctcagtttatggaccagaacaacccgctgtctgagattacgcacaaacgtcgtatctccgcactcggcccaggcggtctgacccgtgaacgtgcaggcttcgaagttcgagacgtacacccgactcactacggtcgcgtatgtccaatcgaaacccctgaaggtccgaacatcggtctgatcaactctctgtccgtgtacgcacagactaacgaatacggcttccttgagactccgtatcgtaaagtgaccgacggtgttgtaactgacgaaattcactacctgtctgctatcgaagaaggcaactacgttatcgcccaggcgaactccaacttggatgaagaaggccacttcgtagaagacctggtaacttgccgtagcaaaggcgaatccagcttgttcagccgcgaccaggttgactacatggacgtatccacccagcaggtggtatccgtcggtgcgtccctgatcccgttcctggaacacgatgacgccaaccgtgcattgatgggtgcgaacatgcaacgtcaggccgttccgactctgcgcgctgataagccgctggttggtactggtatggaacgtgctgttgccgttgactccggtgtaactgcggtagctaaacgtggtggtgtcgttcagtacgtggatgcttcccgtatcgttatcaaagttaacgaagacgagatgtatccgggtgaagcaggtatcgacatctacaacctgaccaaatacacccgttctaaccagaacacctgtatcaaccagatgccgtgtgtgtctctgggtgaaccggttgaacgtggcgacgtgctggcagacggtccgtccaccgacctcggtgaactggcgcttggtcagaacatgcgcgtagcgttcatgccgtggaatggttacaacttcgaagactccatcctcgtatccgagcgtgttgttcaggaagaccgtttcaccaccatccacattcaggaactggcgtgtgtgtcccgtgacaccaagctgggtccggaagagatcaccgctgacatcccgaacgtgggtgaagctgcgctctccaaactggatgaatccggtatcgtttacattggtgcggaagtgaccggtggcgacattctggttggtaaggtaacgccgaaaggtgaaactcagctgaccccagaagaaaaactgctgcgtgcgatcttcggtgagaaagcctctgacgttaaagactcttctctgcgcgtaccaaacggtgtatccggtacggttatcgacgttcaggtctttactcgcgatggcgtagaaaaagacaaacgtgcgctggaaatcgaagaaatgcagctcaaacaggcgaagaaagacctgtctgaagaactgcagatcctcgaagcgggtctgttcagccgtatccgtgctgtgctggtagccggtggcgttgaagctgagaagctcgacaaactgccgcgcgatcgctggctggagctgggcctgacagacgaagagaaacaaaatcagctggaacagctggctgagcagtatgacgaactgaaacacgagttcgagaagaaactcgaagcgaaacgccgcaaaatcacccagggcgacgatctggcaccgggcgtgctgaagattgttaaggtatatctggcggttaaacgccgtatccagcctggtgacaagatggcaggtcgtcacggtaacaagggtgtaatttctaagatcaacccgatcgaagatatgccttacgatgaaaacggtacgccggtagacatcgtactgaacccgctgggcgtaccgtctcgtatgaacatcggtcagatcctcgaaacccacctgggtatggctgcgaaaggtatcggcgacaagatcaacgccatgctgaaacagcagcaagaagtcgcgaaactgcgcgaattcatccagcgtgcgtacgatctgggcgctgacgttcgtcagaaagttgacctgagtaccttcagcgatgaagaagttatgcgtctggctgaaaacctgcgcaaaggtatgccaatcgcaacgccggtgttcgacggtgcgaaagaagcagaaattaaagagctgctgaaacttggcgacctgccgacttccggtcagatccgcctgtacgatggtcgcactggtgaacagttcgagcgtccggtaaccgttggttacatgtacatgctgaaactgaaccacctggtcgacgacaagatgcacgcgcgttccaccggttcttacagcctggttactcagcagccgctgggtggtaaggcacagttcggtggtcagcgtttcggggagatggaagtgtgggcgctggaagcatacggcgcagcatacaccctgcaggaaatgctcaccgttaagtctgatgacgtgaacggtcgtaccaagatgtataaaaacatcgtggacggcaaccatcagatggagccgggcatgccagaatccttcaacgtattgttgaaagagattcgtagcctgggtatcaacatcgaactggaagacgagtaattctcgctcaaacaggtcactgctgtcgggttaaaacccggcagcggattgtgctaactccgacgggagcaaatccgtgaaagatttattaaagtttctgaaagcgcagactaaaaccgaagagtttgatgcgatcaaaattgctctggctagcccagacatgatccgtagttggtctttcggtgaagttaaaaagccggaaaccatcaactaccgtacgttcaaaccagaacgtgacggccttttctgcgcccgtatctttgggccggtaaaagattacgagtgcctgtgcggtaagtacaagcgcctgaaacaccgtggcgtcatctgtgagaagtgcggcgttgaagtgacccagactaaagtacgccgtgagcgtatgggccacatcgaactggcttccccgactgcgcacatctggttcctgaaaagcctgccgtcccgtatcggtctgctgctcgatatgccgctgcgcgatatcgaacgcgtactgtactttgaatcctatgtggttatcgaaggcggtatgaccaacctggaacgtcagcagatcctgactgaagagcagtatctggacgcgctggaagagttcggtgacgaattcgacgcgaagatgggggcggaagcaatccaggctctgctgaagagcatggatctggagcaagagtgcgaacagctgcgtgaagagctgaacgaaaccaactccgaaaccaagcgtaaaaagctgaccaagcgtatcaaactgctggaagcgttcgttcagtctggtaacaaaccagagtggatgatcctgaccgttctgccggtactgccgccagatctgcgtccgctggttccgctggatggtggtcgtttcgcgacttctgacctgaacgatctgtatcgtcgcgtcattaaccgtaacaaccgtctgaaacgtctgctggatctggctgcgccggacatcatcgtacgtaacgaaaaacgtatgctgcaggaagcggtagacgccctgctggataacggtcgtcgcggtcgtgcgatcaccggttctaacaagcgtcctctgaaatctttggccgacatgatcaaaggtaaacagggtcgtttccgtcagaacctgctcggtaagcgtgttgactactccggtcgttctgtaatcaccgtaggtccatacctgcgtctgcatcagtgcggtctgccgaagaaaatggcactggagctgttcaaaccgttcatctacggcaagctggaactgcgtggtcttgctaccaccattaaagctgcgaagaaaatggttgagcgcgaagaagctgtcgtttgggatatcctggacgaagttatccgcgaacacccggtactgctgaaccgtgcaccgactctgcaccgtctgggtatccaggcatttgaaccggtactgatcgaaggtaaagctatccagctgcacccgctggtttgtgcggcatataacgccgacttcgatggtgaccagatggctgttcacgtaccgctgacgctggaagcccagctggaagcgcgtgcgctgatgatgtctaccaacaacatcctgtccccggcgaacggcgaaccaatcatcgttccgtctcaggacgttgtactgggtctgtactacatgacccgtgactgtgttaacgccaaaggcgaaggcatggtgctgactggcccgaaagaagcagaacgtctgtatcgctctggtctggcttctctgcatgcgcgcgttaaagtgcgtatcaccgagtatgaaaaagatgctaacggtgaattagtagcgaaaaccagcctgaaagacacgactgttggccgtgccattctgtggatgattgtaccgaaaggtctgccttactccatcgtcaaccaggcgctgggtaaaaaagcaatctccaaaatgctgaacacctgctaccgcattctcggtctgaaaccgaccgttatttttgcggaccagatcatgtacaccggcttcgcctatgcagcgcgttctggtgcatctgttggtatcgatgacatggtcatcccggagaagaaacacgaaatcatctccgaggcagaagcagaagttgctgaaattcaggagcagttccagtctggtctggtaactgcgggcgaacgctacaacaaagttatcgatatctgggctgcggcgaacgatcgtgtatccaaagcgatgatggataacctgcaaactgaaaccgtgattaaccgtgacggtcaggaagagaagcaggtttccttcaacagcatctacatgatggccgactccggtgcgcgtggttctgcggcacagattcgtcagcttgctggtatgcgtggtctgatggcgaagccggatggctccatcatcgaaacgccaatcaccgcgaacttccgtgaaggtctgaacgtactccagtacttcatctccacccacggtgctcgtaaaggtctggcggataccgcactgaaaactgcgaactccggttacctgactcgtcgtctggttgacgtggcgcaggacctggtggttaccgaagacgattgtggtacccatgaaggtatcatgatgactccggttatcgagggtggtgacgttaaagagccgctgcgcgatcgcgtactgggtcgtgtaactgctgaagacgttctgaagccgggtactgctgatatcctcgttccgcgcaacacgctgctgcacgaacagtggtgtgacctgctggaagagaactctgtcgacgcggttaaagtacgttctgttgtatcttgtgacaccgactttggtgtatgtgcgcactgctacggtcgtgacctggcgcgtggccacatcatcaacaagggtgaagcaatcggtgttatcgcggcacagtccatcggtgaaccgggtacacagctgaccatgcgtacgttccacatcggtggtgcggcatctcgtgcggctgctgaatccagcatccaagtgaaaaacaaaggtagcatcaagctcagcaacgtgaagagcgttgtgaactccagcggtaaactggttatcacttcccgtaatactgaactgaaactgatcgacgaattcggtcgtactaaagaaagctacaaagtaccttacggtgcggtactggcgaaaggcgatggcgaacaggttgctggcggcgaaaccgttgcaaactgggacccgcacaccatgccggttatcaccgaagtaagcggttttgtacgctttactgacatgatcgacggccagaccattacgcgtcagaccgacgaactgaccggtctgtctagcctggtggttctggattccgcagaacgtaccgcaggtggtaaagatctgcgtccggcactgaaaatcgttgatgctcagggtaacgacgttctgatcccaggtaccgatatgccagcgcagtacttcctgccgggtaaagcgattgttcagctggaagatggcgtacagatcagctctggtgacaccctggcgcgtattccgcaggaatccggcggtaccaaggacatcaccggtggtctgccgcgcgttgcggacctgttcgaagcacgtcgtccgaaagagccggcaatcctggctgaaatcagcggtatcgtttccttcggtaaagaaaccaaaggtaaacgtcgtctggttatcaccccggtagacggtagcgatccgtacgaagagatgattccgaaatggcgtcagctcaacgtgttcgaaggtgaacgtgtagaacgtggtgacgtaatttccgacggtccggaagcgccgcacgacattctgcgtctgcgtggtgttcatgctgttactcgttacatcgttaacgaagtacaggacgtataccgtctgcagggcgttaagattaacgataaacacatcgaagttatcgttcgtcagatgctgcgtaaagctaccatcgttaacgcgggtagctccgacttcctggaaggcgaacaggttgaatactctcgcgtcaagatcgcaaaccgcgaactggaagcgaacggcaaagtgggtgcaacttactcccgcgatctgctgggtatcaccaaagcgtctctggcaaccgagtccttcatctccgcggcaagcttccaggagaccactcgcgtgctgaccgaagcagccgttgcgggcaaacgcgacgaactgcgcggcctgaaagagaacgttatcgtgggtcgtctgatcccggcaggtaccggttacgcgtaccaccaggatcgtatgcgtcgccgtgctgcgggtgaagctccggctgcaccgcaggtgactgcagaagacgcatctgccagcctggcagaactgctgaacgcaggtctgggcggttctgataacgagtaatcgttaatccgcaaataacgtaaaaacccgcttcggcgggtttttttatggggggagtttagggaaagagcatttgtcagaatatttaaggaatttctgaatactcataatcaatgtagagatgactaatatcctgaaactgactgaactaattgagtcaaactcggcaaggattcgatactattcctgtgtaactttcttaaggaacgagaatgaaacaggaagtggaaaagtggcgaccttttggacatccggatggtgatattcgtgatttaagttttcttgatgctcatcaggctgtctacgttcagcatcatgagggcaaagagcctttagagtatcgcttttgggttacctactctcttcactgcttcacaaaagattatgaacatcagacgaacgaagaaaaacaaagcttaatgtaccacgcgcctaaagaatctcgtcccttctgccagcaccgttataacttagcgcgcacacacttaaaaagaactattttggcgctgccagaaagcaacgttattcatgccgggtatggtagctatgccgtgattgaggtggacttagacggaggagataaggcattttactttgttgcgttcagggctttcagggaaaagaaaaaactccgtttgcatgtaactagcgcttatcccatttctgaaaaacagaaaggtaaaagtgtgaaatttttcaccattgcctacaacttattgagaaataagcagcttcctcagcccagtaaataacaaaacccaccttaaggtgggtttcgccagagaattatctctggtattcagaacgccattaccggactttgccttgaccttgcgataatcgcaggttgcgggatgtctgaatttcttcagtctgctgcatcctggaagatgagaacatgtgttcttattttcgtctctatcatagttgagtatttactctcttacaatcagatctctttcattgctcaacaggcgatggcttcagactttgcattacggaatttttaagaaaggcagggcgaaacgaggaagaagcttttcgccctggacaacattcctgctgacggcactaccataaaaaaacacaacgctttcaacaaccttgcgtttttcatcttccgtagcggctcggaataaatttacgttcttacattccgtctcatagtctttggctggcgcgtcccagatagctgtcccagtctttccataccggctgcaaaccctgagcggttaacgcggcagcaaccgcttccggtctgcgatcgtcgtgcggactgaactgttccaactcggggtgattatcggcatagccacctggctgcgttttgctgaaggcgctgacgttattgatcgccagcggaataacgcgatcgcgaaaccacggactttcccgcgtggagagactcagttcaatctccggtgcaagcagtcggaaggcgcagatggtttgcactaactggcgttcatccataatgctcgcaggctcaatgccgccagtacacgggcgcaggcgcggaaaggagacagagtaacggctttgccagtaatgctgttgcagccatagcaaatgttcggcaaccatatagctgtcaacgcgccagttgtcggaaaggccaattagcgcgccgaggcctatcttatcaatccccgcacgccccagccgatccggcgtttccagccgccagaagaagtcctgttttttgcctttcagatgatggcgggcataagtcgcctcgtgatatgtctcctgataaaccatcacgccatccagaccaagttgctttaactcggcgtattccgtctccgccagcggttgcacttccatctgtagactagagaactgttcacgaagggcagggagatgacgacgaaagtaatccatccccactttcgcctgatgttcaccagtgactaacagcagatgttcaaagcccatctcccgtatagcggcactttccctggcaatatccgcttcatccagcgttttgcgcttgatgcgattactcatggaaaatccacagtacgtgcagtcgttagcgcaaagattggaaagataaagcgggacgtagaaactaactgtgttgccaaatcgctgacgggtcagacgctgcgcccgttgggccagttgttccagatagccactggcggcagggcttaacagcgccatcatgtcgtcgcgggtgagttggctggcatttagcgcccgctctacgtcagcagccgttttgccgttgatacgcaggcggatgtcgtcccagtccagttgtcgccagcgatcgctgaaggttttcatgcgcttgcctccagaaatccggtcagcgggctggtggcatgagcaaaataactgcggctgcccggtccggactgacgtgccagtaggcctgcttctaccgccagacgaaatgccttcgccatgttgacgggatcgtccgcgacggcaatcgccgtattcactaacaccgcgtcggcccccatttccagcgcctgcgcggcatggctgggaacgccgatgccagcatcgacaaccaccggcactgtggcctgctggataataatctccagcatggcgcgggtttccagtccctgattgctgccaatcggcgcgccgagcggcatcaccgctgcacagccgacttcttccagacgtttacacaataccggatcggccccgcagtaaggcagcacgacaaatccctgttgtaccagcgtttcggcggctttcagggtttcgatgggatcgggcaacagccagcgggcgtcagggtgaatctctaattttaaccagtttgtgcctaacgcttcacgagccagatgggcggcgaaaatggcttcttccgctgttttcgccccggatgtatttggcagcagggtcacacccgccgcgataagcggttcgaggatagcgtcgttgtgctggcgcaagtcgacacgtttcatcgccagtgtcaccagctggctgccggaagcgcggatcgcctccaccatcagttgactagaagcgaatttccctgtgccggtaaacagatgactatcaaacgttttgtccgcaatacgtaacatttcaaccccctgcaataacctgaaaaagcaggatctggtcgccatcctgcacgatatgttgcgcccactgctcacgcgggacgatttgctgattaatcgccagagccgcgcccgcttgtcgttggtcgagttgctccagtagttcgtgaacagtttgcccggcggcgcactgcatcgcttgatcgttaaacaggatctgcattgcttcctccgcataccgggcaaccactggcgcggcgcaacgccaggctgcgccactggctgcttttaccgtcgaacagtcggagttctcccgcaggtgtctctataccgcttaataacttaatggcttccagtgcctgcaaagtgcccataaccccgaccaccgggccaaccacgcccgccgtgcggcagttgcgttctggctcctggttatctggccacaggcagcggtaacacccctgctcccagggcggcgtcagtaccatcaactgaccgccaaatccgaccgcgctggcggtgataagcggcgtgttgagtgccacgcaggcggcattaatctcctggcgagtcgccatattgtcggtacagtcgagcaccacatcggcccgtgcaaccgcatcttttaacgcctcacccgttaaccgttgttgtaatgctgtcagttgaatgtcgggattcaactgtgtcagtcgctgttggctgacctggcttttcgggcgatcgatatcttcagtggtaaagaggatttgtcgttgcagattgcttaaatgcacatcgtcgtcatctgccagtaccagcgtcccgacgccagcgcccgccaggtacagcgcagcaggtgtacccagcccgcccagaccgataatcagcacctggctgtcgagcagtttttgctgcccgtccagagcgatatcgtcgagcaggatttggcggctataacgcataaagtcacggtcattcatcgccaactcctgcaatttccagcaactgtgccgttgccaaacgccagtctgcggcttgagtaatggcgctgacgacggcgatactgccgacacccgttgctatcaccgcaggcgcgcgtgccagactgataccgccaatcgccacggtgggataatccgccagtcgctcaacatgccgtgccagctgttccagcccctgcggtgcagaaggcatctgtttggtttgcgtcgggaacacatgtcccagcgcgatataagaggggcgtgctgccagcgcgacgtcgatttccatatcgtcatgtgtgctaacgcccagccgcaggcctgccgcgcggatggcattgagatcggtggcttgcaaatcttcctgccccaaatggacgccatacgcctgatgcttgatcgccagccgccagtaatcgttgataaacaatcgcgcgttatagcggcggcccagcgcaattgccgccacgacatcggcttccacctcttcatcgcgccgatctttgatgcgtagctggagagtacgtacgcctgcatccaacagacgttcgatccactgtacgctgtccaccaccgggtacagtccactacgaaaaggtacaggaggaaaatcaggctgatacatcacgcttcctccttacgcaggtagatttctccgcctctggcacggaagttctcgctcatatccgccattcccatttcaatagtttgcgtggcggcgtaatcacgcacttcctggctgattttcatgctgcagaatttcggcccacacatggagcaaaaatgggcgactttaccactctcttgcggcagggtttcatcgtgataagcgcgggcggtaaacgggtcgagggccagattaaactggtcttcccagcgaaattcgaagcgggctttgctcatggcgttatcgcgaatttgcgcgcccggatgccctttcgccaggtcagcggcgtgggcagcaatcttataggtgataagcccctgcttaacatcttctttattgggcagacccagatgctcttttggcgttacgtaacagagcatcgcgcagccaaaccagccaatcatcgccgcaccaatcccgctcgtgaagtggtcatagcccggcgcaatatcggtagttagcggccccagagtgtaaaacggcgcttcgtggcagtgctctaactcctcggtcatattgcggcggatcatctgcatcggcacgtggcctgggccttcaatcatcacctgcacgtcatattcccaggcaattttggtcagttcgcccagcgtatgcagctcggcaaactgcgcttcatcgttggcgtcctgaatagaaccggggcgcagaccgtcgcccaggctcaggctaacgtcataagcggcacagatttcacaaatttcgcggaagtgttgatagaggaaattttcctgatgatgggagaggcaccatttcgccataatgctaccgccgcgagagacgataccggtcaggcgtttcgcggtcatcggcacatagcgcagcagtacgcccgcatggatagtgaagtaatccacaccttgctcggcctgttccagcagcgtgtcgcggaacgcttcccaggtaagatcttcggcgatcccgttaaccttctccagcgcctggtagatcggcactgtaccgatcggcaccgggctgttacgcaaaatccactcgcgggtttcgtgaatatagcgaccggtggagagatccatcaccgtatccgctccccagcgcgtggaccataccagcttttccacttcttcttcgatggaagaggtgaccgcgctgttgccgatattggcgttaacttttaccaggaaattgcgaccaataatcatcggctcgctttccggatgattaatgttggccgggataatcgcacgtccggcagcaacttcatcacggacaaattccgcagtgatattttccggcagatgtgcgccaaagctcattcccggatgctggtggcgtaaaacctcgctacggatgcgctcgcggcccatattctcgcggatggcgatgaattccatttccggcgtgatgatgccctggcgggcgtagtgcagttgggtgacacggcgtcctgctttggcgcgttttggtgttagtacgccgctaaaacgcagttcgtcgaggccatcatctgccagccgcgctttagtgtaatcggaactgcgcacggtaagttcttcggtatcgccgcgcgcatcgatccacggctggcgtagttttgccagcccttgctgcacgttaatggcaatctgcggatcaccatacgggccggaggtgtcgtagaccggaatcgcttcgttttcttcgtactgcggctgttctttgctaccgccaattagcgtcgggctaagctggatctcacgcatcggcacgcgcacgccggggtgtgtgccagtgatataaatgcgtttactgttgggaaaggcggtgccttccagggtgtcgataaaatgttgggcccgggcgcgttgttcgcggcgggtcagttttgttgcagacatagctcattccaaaaagttaaggacgtggcttgtcagacgacggatgaagcaagagacgatcgccgcaggggcgatgcgatagcagattaactcttgttcccttcgcaggtattagcctgatcaggttccgcggatcccgaataaacggtctcagccagttaaggcactccgacaagaaattagccccgcaaatggggcattgaatgtaaattacgcgttaacagcgcagaactcaagcaggatgtttgacgcgggcggcgtcaagcaccagcagaatcagcttatcttccagcacaaagcgcgcttccagcgcctcgccgatgtcagataaaacctgttgaaactcaaggtaattatcatgatcgatggcggtttccagactggaatcgtagtaatccataatctgttgagtattggcttcgagttgcggccaaatcttcgcggcgcgcgcgagttgcccgttgccttccagcttatgaagaatgcgctcataaatactgaaatgtccggcagacaagtaatcgaccaggctctgacaaaaatcatcaagggctttttcgtttagcctcatgtagctttctttgccaggcttaatgccaaccagattgtagtaagccacgagcagatgcttacgtacatgtagccagcgatcaaccagtttgttacttcctctgacgcgctccgtcaggttatcgagctggttaagcatgattgactccgcaagtttgtattcaaaaactgctcagtgagaaatgtaaaaaccatgttaaacatgccagtgatgcaaaggtagtgcaagagctatggatcgtataattgaaaaattagatcacggctggtgggtcgtcagccatgaacaaaaattatggttgccgaagggagaattgccatatggcgaagcggcaaatttcgatcttgtgggtcagcgcgcactacaaatcggcgaatggcagggggaacctgtttggttagtacaacagcagcggcgtcacgatatggggagcgtacgtcaggtcattgatctcgatgttgggctgtttcaactggccggacgaggcgtacaactggcggagttttaccgaagtcataaatactgtggttactgcgggcatgaaatgtatccgagcaaaaccgaatgggcgatgctgtgcagccattgccgtgagcgttactacccgcaaatcgccccctgcattattgttgccatccgtcgcgatgatagcatcctcctcgcccagcatacccgccatcgtaacggtgtccatacagtacttgccggattcgtcgaagtgggcgaaaccctcgagcaggcagtcgcgcgggaagtgatggaagagagcggaattaaagttaaaaacttgcgttacgtgacttctcagccgtggccgtttcctcagtctttaatgaccgcgtttatggcggaatatgacagcggcgacatcgtgatcgacccgaaagaattgctcgaggcgaactggtatcgctatgacgatttgccgttactcccgccgcccggcaccgtagcgcgccgtctgatagaagatacggtggcgatgtgtcgggcagagtatgagtgatgatacactgaccgcctgacgcactaaggaacagccaaaatgaccgaacttaaaaacgatcgttatctgcgggcgctgctgcgccagcccgttgatgtcactccagtatggatgatgcgccaggcgggtcgctatctaccggaatataaagccacgcgcgcccaggcaggcgattttatgagcctgtgcaaaaacgccgagctggcgtgcgaagtgactttgcaaccgctgcgtcgctacccgctggatgcggcgatcctcttttccgatatcctcaccgtgccggacgcgatggggttagggctctattttgaagccggagaaggtccgcgttttaccagcccagtcacctgcaaagctgacgtcgataaactgccaattccggacccggaagatgaactgggttacgtgatgaacgcggtgcgtaccattcgtcgcgaactgaaaggcgaagtgccgctgattggtttttccggcagcccgtggacgctggcgacctacatggtggaaggcggcagcagcaaagccttcaccgtgatcaaaaaaatgatgtatgccgatccgcaggcgctgcacgctctgctcgataaactggcgaaaagcgtcactttgtatctgaatgcgcagattaaagccggtgctcaggcagtgatgattttcgacacctggggcggcgtgcttaccgggcgcgattatcaacagttcagcctctattacatgcataaaattgttgatggtttactgcgtgaaaacgacggtcgccgcgtaccggtcacgctgtttaccaaaggcggcggacagtggctggaagccatggcagaaaccggttgcgatgcgctgggcctcgactggacaacggacatcgccgatgcgcgccgccgtgtgggcaataaagtcgcgttgcagggtaatatggatccgagcatgctgtacgcgccgcctgcccgcattgaagaagaagtagcgactatacttgcaggtttcggtcacggcgaaggtcatgtctttaaccttggtcacggcattcatcaggatgtgccgccagaacatgctggcgtgttcgtggaggcagtgcatcgactgtctgaacagtatcaccgctaaggagtgattatggatctcgcgagtttacgcgctcaacaaatcgaactggcttcttctgtgatccgcgaggatcgactcgataaagatccaccggatctgatcgccggagccgatgtcgggtttgagcagggcggagaagtgacgcgagcggcgatggtgctgctgaaatatcccagccttgagctggtcgagtataaagttgcccgcatcgccaccaccatgccttacattccaggttttctttccttccgcgaatatcctgcgctgctggcagcgtgggagatgctgagccaaaagccggatttagtgtttgtcgatggtcatgggatcagccatcctcgccgtcttggcgtcgccagccattttggcttattggtggatgtgccgaccattggcgtggcgaaaaaacggctctgcggtaaattcgaaccgctctccagcgaaccgggcgcgctggccccactgatggataaaggcgagcagctggcctgggtctggcgcagcaaagcgcgctgtaacccgttgtttatcgctaccggccatcgggtcagcgtggacagcgcgctggcgtgggtacaacgctgcatgaaaggctatcgtctgccggagccaacgcgctgggcggacgcggtggccagcgaacgtccggcgttcgtgcgctatacagcaaatcagccctaattcaggtaaactgcggataatttccgtatttgagaactcaacatgttacaaaacccaattcatctgcgtctggagcgcctggaaagctggcagcatgtcactttcatggcttgcttatgcgaacgcatgtaccccaattacgccatgttctgccagcaaaccggttttggtgatgggcaaatttaccgtcgcattctcgatctcatctgggaaacgctgaccgttaaagacgcaaaagtaaatttcgacagccaactggagaaatttgaagaagcgattcctagtgccgacgatttcgatctgtacggcgtttatccggcaatcgatgcctgcgtggcgttaagtgaactggtccatagccgtttgagtggtgaaacgctcgaacacgcggtggaagtgagtaagacctccatcacgaccgttgcgatgctggaaatgactcaggctggtcgcgaaatgagcgatgaagagcttaaagaaaacccagctgtagagcaagaatgggacattcagtgggaaatattccgacttttagctgagtgcgaagaacgcgatatcgagctgataaaaggccttagggcagacctgcgtgaggcgggtgagagcaatattggtataatttttcagcaataagaccagaaaacgtgatttaacgcctgatttgtcgtacctggagtcttccctttcgcccccgtctggtctacatttggggggcgaaaaaaagtggctatcggtgcgtgtatgcaggagagtgctattctggcatttccgtcgcactcgatgcttagcaagcgataaacacattgtaaggataacttatgaacaagactcaactgattgatgtaattgcagagaaagcagaactgtccaaaacccaggctaaagctgctctggagtccactctggctgcaattactgagtctctgaaagaaggcgatgctgtacaactggttggtttcggtaccttcaaagtgaaccaccgcgctgagcgtactggccgcaacccgcagaccggtaaagaaatcaaaattgccgcagctaacgtaccggcatttgtttctggcaaggcactgaaagacgcagttaagtaagattgcgtggcagtgaacagttttaacgaaggggtggttagtccccttttgtctttctggcgtcgaagtttgatgctggctggcgctctgcttctcactgcctgtagtcataactctagtcttcctccctttaccgccagtggatttgctgaagaccagggcgcggtacgcatctggcgaaaagacagcggcgataatgtgcatctgcttgccgtgtttagcccgtggcgcagtggcgataccacgacgcgagagtatcgctggcagggcgataacctcacgctcatcaatatcaatgtttacagcaaaccgccggtgaatattcgcgcgcgttttgacgatcgcggtgatctgagctttatgcaacgtgaatccgatggggaaaagcagcagctttctaacgaccaaatcgatttataccgttatcgtgctgatcagatccgccagattagcgatgccttacgtcaggggagagtcgtgctgcgccaggggcgctggcatgcgatggaacagaccgtgaccacctgcgaagggcaaaccattaaacctgatttagatagccaggcgatagcgcatatcgagcgccgccagagccgctcttctgttgatgtcagcgtggcatggctggaagcgcccgaaggtagccaattactgttagtggcaaactctgatttctgtcgctggcaacccaacgagaaaacgttctgatttaccagtggcccatacccatatgaccgccaccaccgcagccgccgtagcccatgcccattccggctccgcgcggaatacccgcttcagccatcgcgatatctcgtttcacccgtaactcatctaagctctgacgcaaattctccatctctttggcgaccgcgttaattttgctgctatccggtgggttcgcggctaacagggcattgtattcataacgcttcgtcaccagttgctgttgcagtgcgctgctttgagcgtaaaagtcattatggattttctgccacgctgtctgttgttcgctggtcaaaggcgcggcattttgctgccacataccgtgtccgccgtgagcaaatgcagatgtgcttcccatcgccattgcactaagcgccatcattaccagggcaattttcgtgttccgtttcatggttaatcctccagtggttgtcttacttcgggtattgcatcttccgtgccaacgatgaaacgctgatatgacgggtaatctggcatgataaacgagtaaaaatgactcgcctgctgcgggtagcgagtcatttttactcattgaaacttaagcctttgtgttacagcgcagggtaagcgctgataaaagatggcatgatttctgctgtcagaaagggatgagcaggcaaagaagaagatgcgttttatgcaacgttctaaagactccttagctaaatggttaagcgcgatcctccccgtggtcattgttgggctggtgggattgtttgcggtaactgtgattcgtgattatgggcgggcaagcgaggcagaccgccaggcattactggaaaaaggtaatgtgcttatccgcgctctggagagcggaagccgcgtagggatggggatgcgaatgcaccatgtacagcaacaggcgcttctggaagagatggcgggacagccgggagtgttgtggttcgcagtcaccgatgcgcagggcatcattattcttcatagcgaccccgataaggtcgggcgtgcgctctatagcccggatgaaatgcagaaattaaagccagaggaaaactcccgctggcggctgcttgggaaaacggaaactacgcctgcacttgaggtctatcgtttgttccagccaatgagtgcgccctggcggcatggaatgcacaatatgccgcgctgtaacggcaaagctgtgccacaagtagatgcacaacaggctatttttatcgccgttgatgccagtgatctggttgcaacccagagtggggaaaagcgcaataccctgattatcctcttcgccctggcgacggtcttgctggcaagcgtattgagtttcttctggtatcgccgctatctgcgcagccgccagcttctacaagatgaaatgaagcgcaaagagaagctggtggcgctggggcatcttgcggcaggcgttgcccacgaaatccgtaacccactttccagcattaaaggactggcgaaatactttgccgagcgcgcgcctgcagggggagaagcgcatcaactggcgcaggtgatggcgaaagaggccgaccgtttaaaccgcgtggtaagcgagttgctggaactggttaagccaacgcatctggctttgcaggcggtggatctcaacacgctgattaaccacagtttacagctggtaagtcaggatgcaaacagccgggagatccagttacgctttaccgccaacgacacattaccggaaattcaggccgacccggacaggctgactcaggtcctgttgaatctctatctcaatgctattcaggcgattggtcagcatggcgtgattagcgtgacggccagcgaaagcggcgcgggcgtgaaaatcagcgttaccgacagcggtaagggaattgcggcagatcagcttgatgccatcttcactccgtacttcaccactaaagccgaaggcaccggattggggctggcggtcgtgcataatattgttgaacaacacggtggtacaattcaggtcgcaagccaggagggaaaaggcagtacgttcaccctctggcttccggtcaatattacgcgtaaggacccacaaggatgacgcacgataatatcgatattctggtggtggatgatgacattagccactgcactattttgcaggctttactgcgcggctggggctataacgtcgcgctggcgaacagcgggcgacaggcgttggagcaggtgcgggaacaggtttttgatcttgtgctttgcgatgtgcgaatggcggagatggacggcatcgccacgctgaaagagatcaaagcgttaaacccggcaattccggtgctgattatgactgcgtactccagcgtcgagacggcggtagaggcactgaaaactggggcgctggattatctcatcaagccgctggatttcgataacctacaggcgacgctggaaaaagcgctcgcgcatacgcacagtattgatgctgaaacacctgcggtgactgccagccagttcggtatggtcggtaaaagcccggcgatgcaacacctgctcagtgaaatcgccctcgtcgcgccaagcgaagccacggtactgatccacggcgattccggcaccggtaaagagctggtcgccagggcgattcacgccagtagcgcacgtagcgaaaaaccgctggtaacgctcaactgtgcggcactcaacgaatccttgctggaatctgaattgttcggtcacgaaaaaggggcgtttactggagccgataaacgccgggaagggcgctttgttgaggcggacggcggcacgctgtttctcgatgaaattggcgatatcagcccgatgatgcaggtgcgtctgctgcgtgcgattcaggagcgcgaagttcagcgtgtcggtagcaaccagattatcagcgttgatgtccggctgattgcggcgacccatcgcgatcttgccgcagaggtgaatgccgggcgttttcgccaggatctctactatcgcctgaatgtggtggcgattgaagtaccaagcctgcggcaacggcgggaagatatccctctgctggctggccattttctgcagcgctttgccgagcgtaatcgcaaggcggtaaaaggttttacgccccaggcgatggatctgttgattcattacgactggccgggaaatattcgtgagctggaaaacgcggtggaacgggcagtggtgctgctgaccggggaatatatttccgaacgcgagctgccgctggcgattgccagtacgccgatcccgctgggacaaagtcaggatattcagccgttggtggaagtggaaaaagaggtgattctggcggcgctggagaaaacgggcggcaacaaaaccgaagccgcccgtcagttagggatcacgcgcaaaacgctattggcaaaactgagccgttaattctgctcgcgttcgatagcgcgccagccgatatctttccggcagaagcagtcgtcccagtggatatcggtcattaaggcataggcgcgtttctgcgcttctgccacggtatgacccagcgcggtgacgcacagtacgcgcccgccgttggtcactacctgctcgtcatccgccagttttgtgcccgcgtggaacactttgccgcctgccacttcttccagcggcaggccgtggatcacgtcaccggtgcggtaatcacccggatatccacccgcagccatcaccacgccgagagaagcgcgttcatcccactcggacgttttctcgtccagtttgctttcacaggccgccaggcagagctcaaccagatcggacttcatgcgcagcataatcggctgggtttccggatcgccaaagcggcagttaaattcaataaccttcggattgccctgtttgtcgatcatcaggcccgcgtagagaaaaccggtgtaggtgttgccttccgccgccatgcctttcacggttggccagataatacgttccatggtgcgctgatgaacgtcatcggttactaccggcgcgggggagtaagcgcccatcccgccggtgtttggtccggtatctttatcgcctacgcgtttgtgatcctggctggtagccatcggcagcacatgctcgccgtccaccatcacgataaagctcgcttcttcgccatcgaggaactcttcgataacgatgcgatgacccgcgtcgccaaaagcgttgcccgccagcatatcgtgaacagccgcttccgcttcttccagcgtcatcgccacgataacgcctttcccggcagccagaccgtccgctttaatgacgattggcgcgcctttctcacgcagatacgccagcgcaggttctacctcggtgaagttctggtattccgccgtagggatcttatggcgggccaggaaatctttggtaaacgctttactgccttccagttgggccgcacctgcggttgggtcgaagattttcagcccggcggcgcggaaggtatcgaccacgcctttcaccagcggcgcttccgggccgacgatggtcagatcaatcttttcgttttgtgcgaaatccaacagcgccgggatatcggtcacgccaatagcaacgttttgcagcgcgggttccagtgcagtgcctgcattacccggagcaacaaaaacagtctcaaccagcgggctctgggccgctttccaggccagcgcgtgctcgcgcccgccgttaccaatcactaatactttcatctattgctccattaatggcggaagtggcgcatgtcggtgaagagcatcgcaataccgtgctcgtcggcggcggcaatcacttcgtcatcacggatagaaccgccaggctggattacgcaggtcacgcccgcagcggcggcggcatcaataccgtcgcggaacgggaagaacgcgtcagaagccatgctggaacctttcacttccaggccttcatcggccgctttaataccggcgatttttgcggagtacacgcggctcatctggcccgcgccaatgccgatagtcatattgtttttggcatagacgatagcgttggatttcacaaacttcgccaccttccagcagaacagcgcatcacgcagttcctgttcgctcggctgacgtttggtcaccacgcgcagttcttccgcaccgaccatccccaggtcacgatcctgaaccagcagaccgccgttcacgcgtttgaaatcgaggcccggaacacgctcgccccactgaccgcaggtcagaacgcgtacgttctgtttggcggcggtgattttcagggcttcttcgctggcggacggcgcaataatcacttcgacaaactgacgagaaatgatggcctgtgcggtttccgcatccagctcgcggttaaaggcaatgatgccgccgaatgcggaggttgggtcggttttgtacgcgcgatcgtaagcatcaagaatggaattgccgatagccacgccgcaagggttggcgtgcttcacaatcacacatgccggctcggcgaactctttcacgcactccagcgccgcatcggtatcggcgatgttgttataagagagggctttaccctgaacctgggttgcggtagcaacggaggcttctttcacattctcttctatatagaaggcagcctgctggtggctgttctcgccgtaacgcatatccagcttcttaatgaagttcaggttcagcgtgcgtgggaagcgaccggcggcttctttgctttcaccgtggtaagccggaaccatgctgccgaagtagttggcaatcatgctgtcgtaggcggcagtgtgttcgaaggctttgatggcgaggtcgaaacgggttgcaagcgtcaggcttccttcgttgtcatccatctctttaataatggcgtcatagtcgctgctcttcaccacgattgcgacatctttatggttcttggcggcggagcgcaccatcgttgggccgccgatatcgatgttctcaaccgcatcttccaggctgcaaccttcacgggccacggtctgggcgaacggatacaggttaacaaccaccatatcgataggctggatctgatgttcttccataatggcatcgtcctggccgcgacggcccagaatgccaccatgtactttcggatgcagggtcttcacgcgtccatccatcatctccgggaaaccggtgtaatcggaaacttcggttaccggcagacctttttctgctaacagacgggcagtgccccctgtagacagcagctccacaccgcgtgcggaaagtgcctgggcgaattcgacgataccggctttgtcagaaacactgagcagagcgcggcggactggacgacgttgttgcatggtaaatcccctggatttgactattacagagagcgttagctgaatttttcgcgaaaaactcagctaacgcccctaacggggcatccttatttttcgcccgcattgtaacgaaaacgtttgcgcaacgctcgcgaatttttctctttcaatggtgatcacaattttgactgtggttaccgtgggcaaaatacagaaattacattgatgattgtggataactctgtgcgtaaaaaggtataaagcgggcttttgctggggaatgcagcagtcagtcatttttctgcaatttttctattgcggcctgcggagaactccctataatgcgcctccatcgacacggcggatgtgaatcacttcacacaaacagccggttcggttgaagagaaaaatcctgaaattcagggttgactctgaaagaggaaagcgtaatatacgccacctcgcgacagtgcgctaaagcgcgtcgcaactgctctttaacaatttatcagacaatctgtgtgggcactcgaagatacggattcttaacgtcgcaagacgaaaaatgaataccaagtctcaagagtgaacacgtaattcattacgaagtttaattctttgagcatcaaacttttaaattgaagagtttgatcatggctcagattgaacgctggcggcaggcctaacacatgcaagtcgaacggtaacaggaagaagcttgcttctttgctgacgagtggcggacgggtgagtaatgtctgggaaactgcctgatggagggggataactactggaaacggtagctaataccgcataacgtcgcaagaccaaagagggggaccttcgggcctcttgccatcggatgtgcccagatgggattagctagtaggtggggtaacggctcacctaggcgacgatccctagctggtctgagaggatgaccagccacactggaactgagacacggtccagactcctacgggaggcagcagtggggaatattgcacaatgggcgcaagcctgatgcagccatgccgcgtgtatgaagaaggccttcgggttgtaaagtactttcagcggggaggaagggagtaaagttaatacctttgctcattgacgttacccgcagaagaagcaccggctaactccgtgccagcagccgcggtaatacggagggtgcaagcgttaatcggaattactgggcgtaaagcgcacgcaggcggtttgttaagtcagatgtgaaatccccgggctcaacctgggaactgcatctgatactggcaagcttgagtctcgtagaggggggtagaattccaggtgtagcggtgaaatgcgtagagatctggaggaataccggtggcgaaggcggccccctggacgaagactgacgctcaggtgcgaaagcgtggggagcaaacaggattagataccctggtagtccacgccgtaaacgatgtcgacttggaggttgtgcccttgaggcgtggcttccggagctaacgcgttaagtcgaccgcctggggagtacggccgcaaggttaaaactcaaatgaattgacgggggcccgcacaagcggtggagcatgtggtttaattcgatgcaacgcgaagaaccttacctggtcttgacatccacggaagttttcagagatgagaatgtgccttcgggaaccgtgagacaggtgctgcatggctgtcgtcagctcgtgttgtgaaatgttgggttaagtcccgcaacgagcgcaacccttatcctttgttgccagcggtccggccgggaactcaaaggagactgccagtgataaactggaggaaggtggggatgacgtcaagtcatcatggcccttacgaccagggctacacacgtgctacaatggcgcatacaaagagaagcgacctcgcgagagcaagcggacctcataaagtgcgtcgtagtccggattggagtctgcaactcgactccatgaagtcggaatcgctagtaatcgtggatcagaatgccacggtgaatacgttcccgggccttgtacacaccgcccgtcacaccatgggagtgggttgcaaaagaagtaggtagcttaaccttcgggagggcgcttaccactttgtgattcatgactggggtgaagtcgtaacaaggtaaccgtaggggaacctgcggttggatcacctccttaccttaaagaagcgttctttgcagtgctcacacagattgtctgatagaaagtgaaaagcaaggcgtcttgcgaagcagactgatacgtccccttcgtctagaggcccaggacaccgccctttcacggcggtaacaggggttcgaatcccctaggggacgccacttgctggtttgtgagtgaaagtcacctgccttaatatctcaaaactcatcttcgggtgatgtttgagatatttgctctttaaaaatctggatcaagctgaaaattgaaacactgaacaacgaaagttgttcgtgagtctctcaaattttcgcaacacgatgatgaatcgtaagaaacatcttcgggttgtgaggttaagcgactaagcgtacacggtggatgccctggcagtcagaggcgatgaaggacgtgctaatctgcgataagcgtcggtaaggtgatatgaaccgttataaccggcgatttccgaatggggaaacccagtgtgtttcgacacactatcattaactgaatccataggttaatgaggcgaaccgggggaactgaaacatctaagtaccccgaggaaaagaaatcaaccgagattcccccagtagcggcgagcgaacggggagcagcccagagcctgaatcagtgtgtgtgttagtggaagcgtctggaaaggcgcgcgatacagggtgacagccccgtacacaaaaatgcacatgctgtgagctcgatgagtagggcgggacacgtggtatcctgtctgaatatggggggaccatcctccaaggctaaatactcctgactgaccgatagtgaaccagtaccgtgagggaaaggcgaaaagaaccccggcgaggggagtgaaaaagaacctgaaaccgtgtacgtacaagcagtgggagcacgcttaggcgtgtgactgcgtaccttttgtataatgggtcagcgacttatattctgtagcaaggttaaccgaataggggagccgaagggaaaccgagtcttaactgggcgttaagttgcagggtatagacccgaaacccggtgatctagccatgggcaggttgaaggttgggtaacactaactggaggaccgaaccgactaatgttgaaaaattagcggatgacttgtggctgggggtgaaaggccaatcaaaccgggagatagctggttctccccgaaagctatttaggtagcgcctcgtgaattcatctccgggggtagagcactgtttcggcaagggggtcatcccgacttaccaacccgatgcaaactgcgaataccggagaatgttatcacgggagacacacggcgggtgctaacgtccgtcgtgaagagggaaacaacccagaccgccagctaaggtcccaaagtcatggttaagtgggaaacgatgtgggaaggcccagacagccaggatgttggcttagaagcagccatcatttaaagaaagcgtaatagctcactggtcgagtcggcctgcgcggaagatgtaacggggctaaaccatgcaccgaagctgcggcagcgacgcttatgcgttgttgggtaggggagcgttctgtaagcctgcgaaggtgtgctgtgaggcatgctggaggtatcagaagtgcgaatgctgacataagtaacgataaagcgggtgaaaagcccgctcgccggaagaccaagggttcctgtccaacgttaatcggggcagggtgagtcgacccctaaggcgaggccgaaaggcgtagtcgatgggaaacaggttaatattcctgtacttggtgttactgcgaaggggggacggagaaggctatgttggccgggcgacggttgtcccggtttaagcgtgtaggctggttttccaggcaaatccggaaaatcaaggctgaggcgtgatgacgaggcactacggtgctgaagcaacaaatgccctgcttccaggaaaagcctctaagcatcaggtaacatcaaatcgtaccccaaaccgacacaggtggtcaggtagagaataccaaggcgcttgagagaactcgggtgaaggaactaggcaaaatggtgccgtaacttcgggagaaggcacgctgatatgtaggtgaggtccctcgcggatggagctgaaatcagtcgaagataccagctggctgcaactgtttattaaaaacacagcactgtgcaaacacgaaagtggacgtatacggtgtgacgcctgcccggtgccggaaggttaattgatggggttagcgcaagcgaagctcttgatcgaagccccggtaaacggcggccgtaactataacggtcctaaggtagcgaaattccttgtcgggtaagttccgacctgcacgaatggcgtaatgatggccaggctgtctccacccgagactcagtgaaattgaactcgctgtgaagatgcagtgtacccgcggcaagacggaaagaccccgtgaacctttactatagcttgacactgaacattgagccttgatgtgtaggataggtgggaggctttgaagtgtggacgccagtctgcatggagccgaccttgaaataccaccctttaatgtttgatgttctaacgttgacccgtaatccgggttgcggacagtgtctggtgggtagtttgactggggcggtctcctcctaaagagtaacggaggagcacgaaggttggctaatcctggtcggacatcaggaggttagtgcaatggcataagccagcttgactgcgagcgtgacggcgcgagcaggtgcgaaagcaggtcatagtgatccggtggttctgaatggaagggccatcgctcaacggataaaaggtactccggggataacaggctgataccgcccaagagttcatatcgacggcggtgtttggcacctcgatgtcggctcatcacatcctggggctgaagtaggtcccaagggtatggctgttcgccatttaaagtggtacgcgagctgggtttagaacgtcgtgagacagttcggtccctatctgccgtgggcgctggagaactgaggggggctgctcctagtacgagaggaccggagtggacgcatcactggtgttcgggttgtcatgccaatggcactgcccggtagctaaatgcggaagagataagtgctgaaagcatctaagcacgaaacttgccccgagatgagttctccctgactccttgagagtcctgaaggaacgttgaagacgacgacgttgataggccgggtgtgtaagcgcagcgatgcgttgagctaaccggtactaatgaaccgtgaggcttaaccttacaacgccgaaggtgttttggcggattgagagaagattttcagcctgatacagattaaatcagaacgcagaagcggtctgataaaacagaatttgcctggcggcagtagcgcggtggtcccacctgaccccatgccgaactcagaagtgaaacgccgtagcgccgatggtagtgtggggtctccccatgcgagagtagggaactgccaggcatcaaattagaaaaaccccggtccataaggccggggttttttgcatatcaattatttgcatgatgaagggaatctcatgagtgttctgtatatccaaattcgtcgtaatcaaattactgttcgcgatcttgaaagcaaacgtgaagtgagtggagacgctgccttcagtaaccagcgcctgttaatcgccaatttctttgttgcagaaaaagttctgcaagatcttgttctgcaactccacccacgtagtacctggcattcttttttgccagcaaaacgtatggatattgttgtgagcgcactggaaatgaatgagggcggtttgagtcaggttgaggaacgcattctccatgaagtggtcgctggggcaacgttaatgaaatatcgccagttccacatccatgcgcaaagtgcggtactcagtgatagtgcggtcatggcaatgcttaagcagaaataatcgtgtcaccattggtgggtactaaacctgaagttcagcccaccgggatgagaaaaaatcgcttacgcccccacatacgccagattcagcaacggatacggtttccccaaatcgtccacctcagagcgtcccgtaaccttaaaacccaccttcttatagaacccaaccgcctgctcattttgctcattaacgttggttgtcagttccggtgccatgctgagcgcatgctccaccagcacccgacctacgccgcagccgcgcacatcaggatcgataaacagcgcatccatatgctgcccacttagcaacataaatccaaccggctgatcccgctcattaaccgcgacccacaacggcgcttccggcaggaaggaacgaactaggtcctccagctcggtccgatactctgcacttagaaaatcgtgagtggcatcgacagaacgacaccaaatcgcaacgagttcctccccttcctcatgccgactgcggcgaatactaataaccattttctctccttttagtcattcttatattctaacgtagtcttttccttgaaactttctcaccttcaacatgcaggctcgacattggcaaattttctggttatcttcagctatctggatgtctaaacgtataagcgtatgtagtgaggtaatcaggttatgccgattcgtgtgccggacgagctacccgccgtcaatttcttgcgtgaagaaaacgtctttgtgatgacaacttctcgtgcgtctggtcaggaaattcgtccacttaaggttctgatccttaacctgatgccgaagaagattgaaactgaaaatcagtttctgcgcctgcttagtaacagtcctttgcaggtcgatattcagctgttgcgcatcgattcccgtgaaagccgcaacacgcccgcagagcatctgaacaacttctactgtaactttgaagatattcaggatcagaactttgacggtttgattgtaactggtgcgccgctgggcctggtggagtttaatgatgtcgcttactggccgcagatcaaacaggtgctggagtggagcaaagatcacgtcaccagcacgctgtttgtctgctgggcggtacaggccgcgctcaatatcctctacggcattcctaagcaaactcgcaccgaaaaactctctggcgtttacgagcatcatattctccatcctcatgcgcttctgacgcgtggctttgatgatagtttcctggcaccgcatagccgctatgctgactttccggcagcgttgattcgtgattacaccgatctggaaattctggcagagacggaagaaggggatgcatatctgtttgccagtaaagataagcgcattgcctttatgacgggccatcccgaatatgatgcgcaaacgctggcgcaggaatttttccgcgatgtggaagccggactagacccggatgtaccgtataactatttcccgcacaatgatccgcaaaatacaccgcgagcgagctggcgtagtcacggtaatttactgtttaccaactggctcaactattacgtctaccagatcacgccatacgatctacggcacatgaatccaacgctggattaatcttctgtgatagtcgatcgttaagcgattcagcaccttacctcaggcaccttcgggtgccttttttatttccgaaacgtacctcagcaggtgaataaattttattcatattgttatcaacaagttatcaagtatttttaattaaaatggaaattgtttttgattttgcattttaaatgagtagtcttagttgtgctgaacgaaaagagcacaacgatccttcgttcacagtggggaagttttcggatccatgacgaggagctgcacgatgactgaacaggcaacaacaaccgatgaactggctttcacaaggccgtatggcgagcaggagaagcaaattcttactgccgaagcggtagaatttctgactgagctggtgacgcattttacgccacaacgcaataaacttctggcagcgcgcattcagcagcagcaagatattgataacggaacgttgcctgattttattagcgaaacagcttccattcgcgatgctgattggaaaattcgcgggattcctgcggacttagaagaccgccgcgtagagataactggcccggtagagcgcaagatggtgatcaacgcgctcaacgccaatgtgaaagtctttatggccgatttcgaagatagtctggcaccagactggaacaaagtgatcgacgggcaaattaacctgcgtgatgcggttaacggcaccatcagttacaccaatgaagcaggcaaaatttaccagctcaagcccaatccagcggttttgatttgtcgggtacgcggtctgcacttgccggaaaaacatgtcacctggcgtggtgaggcaatccccggcagcctgtttgattttgcgctctatttcttccacaactatcaggcactgttggcaaagggcagtggtccctatttctatctgccgaaaacccagtcctggcaggaagcggcctggtggagcgaagtcttcagctatgcagaagatcgctttaatctgccgcgcggcaccatcaaggcgacgttgctgattgaaacgctgcccgccgtgttccagatggatgaaatccttcacgcgctgcgtgaccatattgttggtctgaactgcggtcgttgggattacatcttcagctatatcaaaacgttgaaaaactatcccgatcgcgtcctgccagacagacaggcagtgacgatggataaaccattcctgaatgcttacagtcgcctgttgattaaaacctgccataaacgcggtgcttttgcgatgggcggcatggcggcgtttattccgagcaaagatgaagagcacaataaccaggtgctcaacaaagtaaaagcggataaaagcctggaagccaataacggtcacgatggcacatggatcgctcacccaggccttgcggacacggcaatggcggtattcaacgacattctcggctcccgtaaaaatcagcttgaagtgatgcgcgaacaagacgcgccgattactgccgatcagctgctggcaccttgtgatggtgaacgcaccgaagaaggtatgcgcgccaacattcgcgtggctgtgcagtacatcgaagcgtggatctctggcaacggctgtgtgccgatttatggcctgatggaagatgcggcgacggctgaaatttcccgtaccagcatctggcagtggatccatcatcaaaaaacgttgagcaatggcaaaccggtgaccaaagccttgttccgccagatgctgggcgaagagatgaaagtcattgccagcgaactgggcgaagaacgtttctcccaggggcgttttgacgatgccgcacgcttgatggaacagatcaccacttccgatgagttaattgatttcctgaccctgccaggctaccgcctgttagcgtaaaccaccacataactatggagcatctgcacatgaaaacccgtacacaacaaattgaagaattacagaaagagtggactcaaccgcgttgggaaggcattactcgcccatacagtgcggaagatgtggtgaaattacgcggtagtgtcaatcctgaatgcacgctggcgcaactgggcgcagcgaaaatgtggcgtctgctgcacggtgagagcaaaaaaggctacatcaacagcctcggcgcactgactggcggtcaggcgctgcaacaggcgaaagcgggtattgaagcagtctatctgagcggatggcaggtagcggcggacgctaacctggcggccagcatgtatccggatcagagcctctatccggcaaacagcgtgccagctgtggtggagcggatcaacaacaccttccgtcgtgccgatcagatccaatggtccgcgggcattgagccgggcgatccgcgctatgtcgattacttcctgccgatcgttgccgatgcggaagccggttttggcggtgtcctgaatgcctttgaactgatgaaagcgatgattgaagccggtgcagcggcagttcacttcgaagatcagctggcgagtgtgaagaaatgcggtcacatgggcggcaaagttttagtgccaactcaggaagctattcagaaactggtcgcggcgcgtctggcagctgacgtgacgggcgttccaaccctgctggttgcccgtaccgatgctgatgcggcggatctgatcacctccgattgcgacccgtatgacagcgaatttattaccggcgagcgtaccagtgaaggcttcttccgtactcatgcgggcattgagcaagcgatcagccgtggcctggcgtatgcgccatatgctgacctggtctggtgtgaaacctccacgccggatctggaactggcgcgtcgctttgcacaagctatccacgcgaaatatccgggcaaactgctggcttataactgcagcccgagcttcaactggcagaaaaacctcgacgacaaaactattgccagcttccagcagcagctgagcgatatgggctacaagttccagttcatcaccctggcaggtatccacagcatgtggttcaacatgtttgacctggcaaacgcctatgcccagggcgagggtatgaagcactacgttgagaaagtgcagcagccggaatttgccgccgcgaaagatggctataccttcgtatctcaccagcaggaagtgggtacaggttacttcgataaagtgacgactattattcagggcggcacgtctagtgtcaccgcgctgaccggctccactgaagaaagccagttctaagcaacaacaaccgttgctgactgtaggccggataaggcgttcacgccgcatccggcaatcggtgcacgatgcctgatgcgacgcttgcgcgtcttatcatgcctacagccgttgccgaacgtaggctggataaggcgtttacgccgcatccggcaattctctgctcctgatgagggcgctaaatgccgcgtggcctggaattattgattgctcaaaccattttgcaaggcttcgatgctcagtatggtcgattcctcgaagtgacctccggtgcgcagcagcgtttcgaacaggccgactggcatgctgtccagcaggcgatgaaaaaccgtatccatctttacgatcatcacgttggtctggtcgtggagcaactgcgctgcattactaacgaccaaagtacggacgcggcatttttactacgtgttaaagagcattacacccggctgttgccggattacccgcgcttcgagattgcggagagcttttttaactccgtgtactgtcggttatttgaccaccgcagccttactcccgagcggctttttatctttagctctcagccagagcgccgctttcgtaccattccccgcccgctggcgaaagactttcaccccgatcacggctgggaatctctactgatgcgcgttatcagcgacctaccgctgcgcctgcgctggcagaataaaagccgtgacatccattacattattcgccatctgacggaaacgctggggacagacaacctcgcggaaagtcatttacaggtggcgaacgaactgttttaccgcaataaagccgcctggctggtaggcaaactgatcacaccttccggcacattgccatttttgctgccgatccaccagacggacgacggcgagttatttattgatacctgcctgacgacgaccgccgaagcgagcattgtttttggctttgcgcgttcttattttatggtttatgcgccgctgcccgcagcgctggtcgagtggctacgggaaattctgccaggtaaaaccaccgctgaattgtatatggctatcggctgccagaagcacgccaaaaccgaaagctaccgcgaatatctcgtttatctacagggctgtaatgagcagttcattgaagcgccgggtattcgtggaatggtgatgttggtgtttacgctgccgggctttgatcgggtattcaaagtcatcaaagacaggttcgcgccgcagaaagagatgtctgccgctcacgttcgtgcctgctatcaactggtgaaagagcacgatcgcgtgggccgaatggcggacacccaggagtttgaaaactttgtgctggagaagcggcatatttccccggcattaatggaattactgcttcaggaagcagcggaaaaaatcaccgatctcggcgaacaaattgtgattcgccatctttatattgagcggcggatggtgccgctcaatatctggctggaacaagtggaaggtcagcagttgcgcgacgccattgaagaatacggtaacgctattcgccagcttgccgctgctaacattttccctggcgacatgctgtttaaaaacttcggtgtcacccgtcacgggcgtgtggttttttatgattacgatgaaatttgctacatgacggaagtgaatttccgcgacatcccgccgccgcgctatccggaagacgaacttgccagcgaaccgtggtacagcgtcagcccgggcgatgttttcccggaagagtttcgccactggctatgcgccgacccgcgtattggtccgctgtttgaagagatgcacgccgacctgttccgcgctgattactggcgcgcactacaaaaccgcatacgtgaagggcatgtggaagatgtttatgcgtatcggcgcaggcaaagatttagcgtacggtatggggagatgcttttttgagtaaagcttccatataatttttctccgcaatgtatcgagggttatccgtaaagccaaagctttcagccatcttatttaatgtattaaggattaattcagcaataacccggtgaccaaattcaaaagccaactcaaaggcagagtatttttgtggggctttgtgttgccaaaaatccataatatcttcagcggtaaatccaaacaggcgtgcatggtcagataaagcaagataaaccgtctctacaacattttgttgtttatgctgtatcgcactaaacaaaccgggatattcattagaattatttgccaggaggaggggcttcatattttttttatcgaatttaaacgtattaaacagagtgggtaatgcgttaaaaatagtattaataacgttcatgtgtccgcgctgcatggccataaacaaacccgtgtcgcgcgcaagacttttagcggtcagaagatctacaatatcggaagcactaatgttaatttcctgggctaggctgggcaatgcttcaagaataactttcacgatatcgctatgtccattttgcatcgccagatatagtcctgggcaaccataaaaatcctttgccttcaggagatcgagtacctgttctttagtcaaatgacatgtgcgaattaacaaaggtaacgcgttcaaaacaattttcagcatgtcggcatcaccattcgccataacatggtataaaacatggctggacgttctatttttggcactcaggaatttatacacttgttcgttatctaaatgatgtgttgcggccagtttaggtaaggcgttcagaatgctggttacaacatttttatccttacgacttatcgctaaaaataatccagaaaaaccatttttatcttttgcctccagaatatgcatgagattttttttgctgagtaatccttcatatcctgtttcactcaaactattgaaaatagtctcaacgatatccgcattaccataatttatagccaaatataaacctggcaggttaatactattataggcagtcaacatttctgttctatgtagttctggcattttctggagttgaatcatcagttgcgtaagttggtgattctgaccaattgccattagcaaattcatcgttgcaggacttaatggaggggttatttcatccacagatccttttaacatcaatagctgttctttcggaagtgctggaattattgcaacagattgattaataacatgatcattactccatttcaggaggctataatctacattcataaaatccatcagagaatagtgtttaatattctctttgctttcgctcataattcttattttatcgttagttacattaggatcataaacgctaaccacgtaatgggtacatccttcagttgtgttctttattcttagccggaccgtcaaagcatggttatccaccagtaatatggctgccataacactgatgccattactttccatcttgtcaaaatatgctttcataactagcccgaaatcaccgcaggcagcaacgcaacgcccctcaggacggctggaaaccaacgccaaagtctggtttttgcattttttgttgaagtgcgtgagaaatttttcagcactagagtaatcatcttgatggggtttgtaatcaacattctgataaatatcattaatatattgtgcagcaatgtgtcggcatactatacggttttggggtcgccccggaaaataacattgaccattaagtttaattcttgggaattctttttcttttctatcactttttaggtttaattcttgtttatcaagagtgtcactgcgttgaggtaaaatttccattaggtatttttcaaatattggggcaatggtttgagtaagtgtcgtgttttcgtttttattaattatcgtaatttctttcttatcagcttgtaagacggacgtggaaaatttaatgacaaaatccttgttgctaaagatatgacgaccattttgtctacagttctcactgaagctttttaatagaggcgtcgccagctccttgccagaaaatttatcctcgagttctttataaaacaattcactcagggtttggtgttcatttgtctgggctgtattattaatatttgcagagaaagaactacgaggaatacgagtaatcatttaaatatctcattgtttattgatgtcttgaattttaactatcagaacagtgaaaaaatttaatatgattacaactaaagaaatatcataaatcgctcaatctcataatgcagccgtaaaagtttcggtggaatgagatcttgcgattttgttaataattaagtggtttgatgtttaaaaataatgctgagttaataaaagtgtgtgaagtgtatgacattaagttattttggcgtcaatgcgattaacagacacccttattctattgccactcaggtatgatgggcagaatattgcctctgcccgccagaaaaagtcagcgcattccaccgtacgccagcgtcacttccttcgccgctttaatcaccatcgcgccaaactcggtcacgcggtcatcggtaatacgactaatcggtccggaaatagaaattgcggcaaacggttcacggtgctcatcgaaaatacacgctgcaaggcaacgtagccccagtgcatgttcctcatcgtcaaaactataaccccgtttgcgcgtttgggcgagatcttcttttaaatgcacaggagacaccagcgttgcgtgggtataggcatgtaaccctttgcggtgcagcagcttcgtcacctgttcttcgctcagttgggctaaaaaggctttacccgcaccggaagcgtgcatcggcaatttaccgccgataggcgcggacattcgcatcagatgcgtacactgtacctggtcgataataatcgcttcgtgatcgctttgatcaagcaccgccatattgaccgtttcgccagactcttccattagattgcgcaggatagggtgaacaatcgctaacaaattacggctctggagaaagctgctgccgaccataaaggcatgtgcgccgattgcccaatgtcccagttcgccaacctgacgcacgaaaccctgctgttgcatcgtggttagcaggcggtgggtcgtggaattgggtaacccggcttgttgcgccagttccgtgagtgccacactgccattggattcggcaatccactccagtaatttcaggccacgcgttaaagactgaacctgtccagtcgctggtgcggtggcaacggcgggttttctgccgcgtttcgcgggaatgggtgcgaccatgacagtctcttttttctgtatcgtggaaatcattttcatttttattgttagctaatgcaatagttactgaactgatccgatgagttaatgttgaacaaatctcatgttgcgtggtggtcgcttttaccacagatgcgtttatgccagtatggtttgttgaatttttattaaatctgggttgagcgtgtcgggagcaagtgtgagcagcaaagtggaacaactgcgtgcgcagttaaatgaacgtattctggtgctggacggcggtatgggcaccatgatccagagttatcgactgaacgaagccgattttcgtggtgaacgctttgccgactggccatgcgacctcaaaggcaacaacgacctgctggtactcagtaaaccggaagtgatcgccgctatccacaacgcctactttgaagcgggcgcggatatcatcgaaaccaacaccttcaactccacgaccattgcgatggcggattaccagatggaatccctgagcgcggaaatcaactttgcggcggcgaaactggcgcgagcttgtgctgacgagtggaccgcgcgcacgccagagaaaccgcgctacgttgccggtgttctcggcccgaccaaccgcacggcgtctatttctccggacgtcaacgatccggcatttcgtaatatcacttttgacgggctggtggcggcttatcgagagtccaccaaagcgctggtggaaggtggcgcggatctgatcctgattgaaaccgttttcgacacccttaacgccaaagcggcggtatttgcggtgaaaacggagtttgaagcgctgggcgttgagctgccgattatgatctccggcaccatcaccgacgcctccgggcgcacgctctccgggcagaccaccgaagcattttacaacagtttgcgccacgccgaagctctgacctttggcctgaactgtgcgctggggcccgatgaactgcgccagtacgtgcaggagctgagtcggattgcggaatgctacgtcaccgcgcacccgaacgccgggctacccaacgcctttggtgagtacgatctcgacgccgacacgatggcaaaacagatacgtgaatgggcgcaagcgggttttctcaatatcgtcggcggctgctgtggcaccacgccacaacatattgcagcgatgagtcgtgcagtagaaggattagcgccgcgcaaactgccggaaattcccgtagcctgccgtttgtccggcctggagccgctgaacattggcgaagatagcctgtttgtgaacgtgggtgaacgcaccaacgtcaccggttccgctaagttcaagcgcctgatcaaagaagagaaatacagcgaggcgctggatgtcgcgcgtcaacaggtggaaaacggcgcgcagattatcgatatcaacatggatgaagggatgctcgatgccgaagcggcgatggtgcgttttctcaatctgattgccggtgaaccggatatcgctcgcgtgccgattatgatcgactccagtaaatgggacgtcattgaaaaaggtctgaagtgtatccagggcaaaggcattgttaactctatcagcatgaaagagggcgtcgatgcctttatccatcacgcgaaattgttgcgtcgctacggtgcggcagtggtggtaatggcctttgacgaacagggacaggccgatactcgcgcacggaaaatcgagatttgccgtcgggcgtacaaaatcctcaccgaagaggttggcttcccgccagaagatatcatcttcgacccaaacatcttcgcggtcgcaactggcattgaagagcacaacaactacgcgcaggactttatcggcgcgtgtgaagacatcaaacgcgaactgccgcacgcgctgatttccggcggcgtatctaacgtttctttcagcttccgtggcaacgatccggtgcgcgaagccattcacgcagtgttcctctactacgctattcgcaatggcatggatatggggatcgtcaacgccgggcaactggcgatttacgacgacctacccgctgaactgcgcgacgcggtggaagatgtgattcttaatcgtcgcgacgatggcaccgagcgtttactggagcttgccgagaaatatcgcggcagcaaaaccgacgacaccgccaacgcccagcaggcggagtggcgcagctgggaagtgaataaacgtctggaatacagcctggtcaaaggcattaccgagtttatcgagcaggataccgaagaagcccgccagcaggctacgcgcccgattgaagtgattgaaggcccgttgatggacggcatgaatgtggtcggcgacctgtttggcgaagggaaaatgttcctgccacaggtggtcaaaagcgcgcgcgtcatgaaacaggcggtggcctacctcgaaccgtttattgaagccagcaaagagcagggcaaaaccaacggcaagatggtgatcgccaccgtgaagggcgacgtccacgacatcggtaaaaatatcgttggtgtggtgctgcaatgtaacaactacgaaattgtcgatctcggcgttatggtgcctgcggaaaaaattctccgtaccgctaaagaagtgaatgctgatctgattggccttagcgggcttatcacgccgagcctggacgagatggttaacgtggcgaaagagatggagcgtcagggcttcactattccgttactgattggcggcgcgacgaccagtaaagcgcacacggcggtgaaaatcgagcagaactacagcggcccgacggtgtatgtgcagaatgccagccgtaccgttggtgtggtggcggcgctgctttccgatacccagcgcgatgattttgtcgctcgtacccgcaaggagtacgaaaccgtacgtattcagcacgggcgcaagaaaccgcgcacaccaccggtcacgctggaagcggcgcgcgataacgatttcgcttttgactggcaggcttacacgccgccggtggcgcaccgtctcggcgtgcaggaagtcgaagccagcatcgaaacgctgcgtaattacatcgactggacaccgttctttatgacctggagcctggccgggaagtatccgcgcattctggaagatgaagtggtgggcgttgaggcgcagcggctgtttaaagacgccaacgacatgctggataaattaagcgccgagaaaacgctgaatccgcgtggcgtggtgggcctgttcccggcaaaccgtgtgggcgatgacattgaaatctaccgtgacgaaacgcgtacccatgtgatcaacgtcagccaccatctgcgtcaacagaccgaaaaaacaggcttcgctaactactgtctcgctgacttcgttgcgccgaagctttctggtaaagcagattacatcggcgcatttgccgtgactggcgggctggaagaggacgcactggctgatgcctttgaagcgcagcacgatgattacaacaaaatcatggtgaaagcgcttgccgaccgtttagccgaagcctttgcggagtatctccatgagcgtgtgcgtaaagtctactggggctatgcgccgaacgagaacctcagcaacgaagagctgatccgcgaaaactaccagggcatccgtccggcaccgggctatccggcctgcccggaacatacggaaaaagccaccatctgggagctgctggaagtggaaaaacacactggcatgaaactcacagaatctttcgccatgtggcccggtgcaagcgttagcggttggtacttcagccacccggacagcaagtactacgctgtagcacaaattcagcgcgatcaggttgaagattatgcccgccgtaaaggtatgagcgttaccgaagttgagcgctggctggcaccgaatctggggtatgacgcggactgattcacaaatctgtcacttttccttacaacaaacagggcgctcaatgagtgccctgtctctttattaatatgaaacacttatactggaaacaggctggaataatcttagccggaaaaacgaatgtcaaaaggcacagtaaagatgccagtcagcgtgtttccggtcctttggtcattcaattgcttcaggaacatataacgataaggagaacctgaactcgtgttaacgctgcttcacctgctttctgccgtcgccctgctggtctgggggactcatattgttcgaaccggcgtaatgcgcgtcttcggcgcgcgtttgcgtactgtccttagccggagcgtcgaaaaaaagccgctcgccttttgcgcggggatcggcgttaccgcactggtacagagcagtaatgccaccaccatgctggtgaccagctttgtcgctcaggatctggtagccctcgcaccggctctggtcattgtgctgggtgcagatgtcgggacggcgctaatggcgcgtattctcaccttcgacttatcctggctgagtccgttacttatttttatcggcgtgatttttttcctcggacgcaaacagagtcgcgccgggcaactgggccgcgtcggtattggtcttgggctgattttgctagcgctggagttgattgtgcaggccgtaacgccgatcacccaggcaaacggcgttcaggtgatctttgccagcctgaccggcgatattctgctggatgcgctgattggcgcgatgttcgccattatcagctactccagccttgctgctgtactgctgaccgcgactctgaccgccgcaggcattatctccttccccgtggcgctctgtctggtgattggtgctaacctcggttccggtctgctggcaatgctcaacaacagtgccgccaatgccgcagcccgccgtgtcgcgctgggtagtctgctgtttaagctggtgggtagcctgattatcctgccgtttgtccatttgctggcagagacaatggggaagttgagtttgccaaaagcggaactggtgatctatttccacgtcttctacaaccttgtacgttgcctggtcatgctgccatttgttgacccgatggcacggttttgcaaaacgattattcgcgatgaaccggaactggatacccagctacggcctaaacatctggatgtcagcgcgctggatacgcccacgcttgctctggcgaacgccgcgcgcgaaaccctgcgcattggcgacgccatggaacagatgatggaagggttgaataaagtgatgcacggtgagccacggcaggagaaagagctgcgtaagctggcagatgatatcaacgttctctacaccgccattaagctgtatctggcgcggatgccaaaagaagagctggcggaggaagagagccgccgctgggcagagatcatcgaaatgagcctcaaccttgaacaggcctccgatatcgtcgagcgcatgggcagcgaaattgctgacaaaagtctggcagcacggcgggcatttagccttgatgggttgaaggaactggatgcgctctatgagcaattgctcagtaatttaaagctggcaatgagcgtgttcttctctggcgatgtcaccagcgctcgtcgtttgcgtcgcagcaaacatcgttttcgcattcttaatcgccgctattcccacgcccacgtcgatcgcctgcatcagcaaaacgtgcagagcattgaaaccagtagcctacatttaggcttactgggagatatgcagcgcctgaacagcctgttttgtagcgtggcttacagtgtgctggaacagccggatgaagatgaaggacgggacgagtattaatattgtgaatcctgtaggcctgataagacgcgtcaagcgtcgcatcaggcactatgaacaagatgccggatcatgcatccggcaattcacttaaaaacggtgaccagcttccagcggaaccgcttcttcaccagccttaaacacataagtggtgttcgggccacccagcgtagcgtgacctttactcactgtgatccagttaccttccggtagaccaataatcgtcagttctggcgcgacgaccagcagttcgcgaatacgctgctcacgggtttcacctttatggccttccggcagcgcgttggtgaagtgcgggttgatttgcagcgggaacagatttagcgcatcgaaaccttgcggatcgacaatcggcatatcgttggtggtacgaatagttgggcaagcaaggttagcgcctgcgctccagccaatatacagagcgccacgtttaaccacgtcagtaattggtgccagcagcccgcgctcgcggcactgtttcagcaactggaaagtattcccgccgccgacaatcacgatctcagcattttcaatcgcggcaacgggatcgacaacgctatgaataccggtgacagaaacacccagcggagcgagaaccgcagccgttttcgctgtgtaatcatcccaggtctgcgttacgccagcgaaagggataaacaccgcactgcggcgaccctgcaactgttcagcaattagcggcagtgcatgttccagccaggctttacccggcagcgtgctgttactcaataaaagcagttccattacttctccggttagtaagaaatcacgggaggcatgctaccactgcgaatttaaccacttactgacatggctcacgatgtcgcacattgcttctggaaagtgatttgagcaggtaacgaattcaagccaatggaaataacaaatagttcgctcatgactattttttatcaacccaaaggtacggtatattccgttttttacaggagaatttatgctgcccgacagtagtgtccgtttaaataaatacatcagcgaaagcggaatttgcagtcgccgcgaagcggatcgctatatcgagcaaggcaatgtgttccttaatggcaagcgagccaccattggcgatcaggtgaaacccggcgacgttgtgaaagtaaacggtcagttgattgaacctcgggaagccgaagatttggtacttatcgccctgaacaagcccgttggtattgtaagcaccaccgaagatggcgagcgcgataacattgtcgatttcgttaaccacagcaaacgcgtgttcccgattggccgcctggataaagactcccaggggctgattttcctcaccaatcacggcgatctggtgaataagatcctgcgtgctggcaatgatcatgagaaagagtatctggtgacggtcgataaaccgattaccgaggagtttattcgcggcatgagtgcgggggtgccaatcctcgggacagtgaccaaaaagtgcaaagttaaaaaagaagcgccgtttgtcttccgcattaccctggtgcaggggctgaaccgtcagatccggcgcatgtgcgagcatttcggctatgaagtgaaaaagctggaacgcacgcgcatcatgaacgttagcttaagcggcattccgctgggggaatggcgcgatttaaccgacgatgagttaatcgacctctttaagctcattgaaaattcctcttccgaggtaaaacctaaagcgaaggccaaaccgaaaacagcgggcatcaaacgtccagtcgttaagatggaaaaaacggcggaaaaaggcggtcgcccggcgtccaacggtaagcgttttaccagcccggggcgtaaaaagaaggggcgctgattaacgcctcagactgatgaaaacggcccaaaagtgcccggacagtcccctcgccccttcgggaaaagggttagggtgaggggaaaattgtgttcacactgacgagtgaaaatctcaggcgttgattgtggattagcgcctgccgcgcgtgctcgtatttgcactccagctaaaactcgcttcaggatccggtttataagcctgctttttcttcaactggcgggcttttttcgcttcagcctcacgctcaaccattaatttatcgatgtaatctttcttaatgctgttggtttcggagttggtcaatacgcgaccatgcgcaatccgcgcccgatccagcagtgttttaagttcacgctgctcgcgttcagtcatctctttttgggtaatacgggggagtgccatgatggtgccctcagtgagccagagagttcagtgtacgggaattcgtttgcgagcagaactgataatattcattttgccttctcttaactatttatctctttcgataattaattagagatgcagataaaaaaattaaaggcaattattctccgataaagacgctggttaacagagtacaggctcgtttattgatgagcatagtgacaagaaaatcaatacggcccgaaatatagcttccaggccatacagtatttactcaaacaaattactatgcagtttttgcaccacctgctcggcatcttcgccgggcaccaggaagcacaggttatggctggatgcgccataacaaatcatgcgaatgttgaacggttccagtacgccgaatacctctttgccaacgccgcaggctttactcaggtcattgccaatcaacgcgaccagcgccagaccttcttccacctccacccgacacagtgcggaaagctccatcagcagagattgcgtcagcaacgtatcgccagtggaggtactaccggtggtatcaagggttaatgccacgctcacttcactcgtggtgattaagtctacgctaatattatgccgcgcgaggatgccgaaaacttccgcgaggaaaccgcgagaatgcagcatattcaggctgtgcaaagtgagcagagtctgattgcgacgaagcgccagagcgcggaacagcggcggattttcagttttattgcacaccagcgtaccacctgcgcgtgggtctttgctggagccgacaaagaccgggatatcgctgcgtactgcgggtagcaacgttgccggatgcagtacttttgcaccaaaagttgccatctctgccgcttcggcaaacgcgatttcatcaatgcgttttgctgcggaaactacgcgtggatcggtggtgtagatgcccgggacgtcggtccagatatcaacacgagatgcgtgtaaagcctccgccagcaaggctgccgtataatcgctgcctccacggccaagcgtcgttgtacgacctttattttcgctaccgataaatccctgggtgatcactaagccttcattgagacgtgggagcagctgcagcgcggccagttccgccagcgcggctatatctggctctgcacgaccaaatcggtcgttggtacgcatcactttacgtacatcaaaccactgtgcctgaacatcgcgttcgcgcaggatctcaacaaacagcagggtgctcatcagctcgccgtggctgaccagctcatctgtcagcgccggagacgttgccagcgccgccgcttctgccagaacagtaatgttctccagcagacgttcaatctcttcacggataacgttcgggtaacgcagacgttccagaatggcaaactggatgttgcggatagcgtcgagtttttcgaatcgctcgccaggttccagtccttcagctaaagcgaccagcagattagtgataccagcagaagcgctgaggacaactaaacgcacgttggcatcagaaagcacaatatcagcgctgcggttcatggcgtcaaaatcagctacgctggtaccgccaaatttggagacaacaatttcagacataactacctcgtgtcaggggatccattttcagccttggcacaagggaagagcggaagacgggtgggcgcagagcgatacttcgctactattttcacccagaagtgctccaccacttgcgaaacgcccgactgcgaacgcttctggtgacaacccaggggattcagcccctgtagccgatgatgaacgtggccagccgttcaatcacctcggcgatgcaccccctcaggtgttatcacaggactggctcctccaacaccgttacttgggcaacgcgcctcttctggcctgcgctagcgcaggtagtacatttataaataaagggtgagcggggcggttgtcaacgatggggtcatgcggatttttcatccactcctggcggtcagtagttcagctaataaatgcttcactgcgctaagggtttacactcaacattacgctaacggcactaaaaccatcacatttttctgtgactggcgctacaatcttccaaagtcacaattctcaaaatcagaagagtattgctaatgaaaaacatcaatccaacgcagaccgctgcctggcaggcactacagaaacacttcgatgaaatgaaagacgttacgatcgccgatctttttgctaaagacggcgatcgtttttctaagttctccgcaaccttcgacgatcagatgctggtggattactccaaaaaccgcatcactgaagagacgctggcgaaattacaggatctggcgaaagagtgcgatctggcgggcgcgattaagagcatgttctctggcgagaagatcaaccgcactgaaaaccgcgccgtgctgcacgtagcgctgcgtaaccgtagcaataccccgattttggttgatggcaaagacgtaatgccggaagtcaacgcggtgctggagaagatgaaaaccttcagtgaagcgattatttccggtgagtggaaaggttataccggcaaagcaatcactgacgtagtgaacatcgggatcggcggttctgacctcggcccatacatggtgaccgaagctctgcgtccgtacaaaaaccacctgaacatgcactttgtttctaacgtcgatgggactcacatcgcggaagtgctgaaaaaagtaaacccggaaaccacgctgttcttggtagcatctaaaaccttcaccactcaggaaactatgaccaacgcccatagcgcgcgtgactggttcctgaaagcggcaggtgatgaaaaacacgttgcaaaacactttgcggcgctttccaccaatgccaaagccgttggcgagtttggtattgatactgccaacatgttcgagttctgggactgggttggcggccgttactctttgtggagtgcgattggcctgagcattgttctctccatcggctttgataacttcgttgaactgctttccggcgcacacgcgatggacaagcatttctccaccacgcctgccgagaaaaacctgcctgtactgctggcgctgattggcatctggtacaacaatttctttggtgcggaaactgaagcgattctgccgtatgaccagtatatgcaccgtttcgcggcgtacttccagcagggcaatatggagtccaacggtaagtatgttgaccgtaacggtaacgttgtggattaccagactggcccgattatctggggtgaaccaggcactaacggtcagcacgcgttctaccagctgatccaccagggaaccaaaatggtaccgtgcgatttcatcgctccggctatcacccataacccgctctctgatcatcaccagaaactgctgtctaacttcttcgcccagaccgaagcgctggcgtttggtaaatcccgcgaagtggttgagcaggaatatcgtgatcagggtaaagatccggcaacgcttgactacgtggtgccgttcaaagtattcgaaggtaaccgcccgaccaactccatcctgctgcgtgaaatcactccgttcagcctgggtgcgttgattgcgctgtatgagcacaaaatctttactcagggcgtgatcctgaacatcttcaccttcgaccagtggggcgtggaactgggtaaacagctggcgaaccgtattctgccagagctgaaagatgataaagaaatcagcagccacgatagcagcaccaatggtctgattaaccgctataaagcgtggcgcggttaatcatcgtcgatatgtaggccggataaggcgttcacgccgcatccggcaaccgatgcctgatgcgacgcggtcgcgtcttatcaggcctacaggtcgatgccgatatgtacatcgtattcggcaattaatacatagcacgattgattaaataaccttaataacaatgccgacgttatgtcggcatttttttatcagataaatccccttgtctgtaatttaacggaaatcataccgtgaggttaatcctaaaatagatttttaatcgttgtttatttcggaaaatacgcagattaattgcttttgtttttattttaagtttatgatttttattgttatttaaatataagttgaaacttatatttgatattcattccaattatcctaaaacgccatcgctaattccccgcgccgtaattcgcatgctttagttgtgtatactcgatcccgcccgaaatgtttttgggtaaatctccattcattcaatgaagggaaattgttatgaaaaaagttctgtatggcatttttgccatatctgcgcttgcggcgacttctgcgtgggctgcacctgtacaggtgggcgaagcggcagggagcgcagcaacgagcgttagcgcggggagttcctccgcgaccagcgtcagcaccgtaagcagcgcggtgggtgtcgcgcttgcggcaaccggtggcggtgatggttctaataccgggaccaccacaaccacgaccaccagtacccagtaataaagtatgtatccccaaaataattcgagtcattgcatctgtggctagaagtatgaagggattaaccataaccacactccggtgtggttattctgcccctctggagaagagtcgtgaagcgacctgcactcattcttatctgcctgttattacaggcctgtagtgccacgactaaagagctgggcaatagtctgtgggacagtctgttcggcacgccaggcgtacagctgacggatgatgatattcaaaatatgccctacgccagccagtacatgcagcttaatggcgggccgcagttatttgtggtgctggccttcgctgaagacggacaacaaaaatgggtcactcaggatcaggctactctcgttacccaacatggccgtctggtgaagactctgctcggcggcgacaacctgattgaagtgaataaccttgctgccgacccgctgattaaacccgcacaaatcgttgatggcgcaagctggacgcgcacgatgggctggaccgagtaccagcaggtacgctacgccaccgcacgcagtgtcttcaaatgggatggcaccgataccgtcaaagtcggcagcgatgaaaccccggttcgcgtgctggacgaagaagtctccaccgaccaggcgcgctggcataaccgctattggatcgacagcgaagggcaaattcgccagagcgaacagtatctcggcgcggattattttccggtgaaaaccactctcatcaaggcggcaaaacaatgattaaacaaactattgtcgcgttgcttttgagtgtgggagcgagtagcgtcttcgcggcaggaaccgtcaaggtgttcagcaatggcagcagtgaggccaaaacgctaacgggcgcagagcatttaatcgatctggtaggccaaccgcggctggcaaacagctggtggcccggtgcggtgattagcgaagagctggcaacggcggcagcattgcgtcagcagcaggcgttgctgacacggctggcagaacagggcgcagattccagcgccgacgatgccgctgcgattaacgccttacgccagcaaattcaggcgttgaaagtgacgggcaggcaaaaaatcaatcttgatcccgatatcgtccgcgttgccgaacgcggtaacccgccgttgcagggcaactacacgctgtgggtcggaccaccgccgtccacggtcacgttgttcgggcttatcagccgtcctggcaagcagccattcactccaggtcgcgacgtggcgagctatctctctgaccagagcctgctcagcggtgcggatcgcagctacgcgtgggtggtttacccggacggacgcacgcaaaaagcgccggtggcttactggaacaagcgtcacgtagagccgatgcccggcagcattatttatgttggcctcgcggactccgtctggagtgagacgcctgatgcccttaacgccgacattcttcagactctgacgcagcggatacctcaataatgaaaaaaagacatctgcttagcttactggcgctgggcattagcacagcttgctacggcgaaacatatcctgcgcccattggtccgagccagagcgatttcggtggcgtaggattattacaaacgcccaccgcgcgtatggcacgggaaggggagttgagtctgaactatcgcgataacgatcagtaccgttattacagtgctagtgtgcaactcttcccgtggctggaaacaacgctgcgctacaccgacgtgcgcacccggcagtacagcagcgtcgaagcgttctctggcgatcaaacgtataaagataaagccttcgatctcaaactgcgtttgtgggaagagagttactggctgccgcaagtggcggttggtgcgcgggatatcggcggtacggggctgtttgatgcggaatatcttgttgccagcaaagcctgggggccgttcgattttacgctcggcctgggctgggggtatttgggcaccagcggtaatgtgaaaaatccgctctgtagtgccagtgataaatattgctatcgcgataacagctacaaacaggcgggatctatcgacggtagccagatgttccacggtcctgccagtctgtttggcggcgtggaataccagacgccctggcaaccgctgcgcctgaaactggagtatgaaggcaataattatcagcaggattttgccgggaagctggagcaaaaaagtaagtttaacgtcggtgcgatttatcgcgttaccgattgggccgacgttaaccttagctatgaacgtggcaacacctttatgtttggcgttacgttgcgcaccaactttaacgatctgcgcccgtcttacaacgataacgcccgcccgcaatatcaaccgcagccgcaggatgccattttgcagcatagcgtggtggcgaatcagttaacgctgttgaaatacaatgccggacttgccgatccacagatccaggcgaaaggcgatacgctgtatgttaccggcgagcaggtgaaatatcgtgatagccgcgaagggatcatccgtgcgaatcggatcgtgatgaacgatctgccggatgggatcaaaacgatccgcattacggaaaatcgccttaacatgccgcaggtgacgacggaaaccgatgtcgccagcctgaaaaatcatctcgccggagagccgttgggccacgaaacgacgctggcgcaaaaacgcgtcgagccagtggttccgcagtccaccgagcagggctggtatatcgacaaaagtcgctttgatttccatatcgatccggtgctgaaccagagcgtcggtggcccggaaaacttttacatgtatcagctgggcgtgatgggaacggcagatttgtggctgacggaccatctgctgaccaccggcagcctgtttgcaaatcttgccaacaactacgacaagtttaactacactaatcctccgcaggacagccacttaccgcgcgtgcgtacccatgtgcgcgagtatgtgcagaacgatgtctatgtgaataacctgcaagccaactacttccagcatctgggcaacggcttctacggtcaggtctacggtggttatctcgaaaccatgtttggcggtgcgggggcagaagtgttgtatcgcccgctggacagcaactgggcgtttggtctggatgccaactacgttaaacagcgcgactggcgtagtgcaaaagatatgatgaaattcaccgactacagcgtgaaaaccggacatctgaccgcctactggacgccatctttcgctcaggatgtgttagttaaagccagcgtcgggcagtatctggcaggggataaaggcggcacgctggagatcgccaaacgctttgatagcggcgtggtggtgggtggctatgccacgatcactaatgttagcaaagaggagtacggcgaaggggacttcaccaaaggcgtgtatgtcagcgtaccgttggatctcttcagctctggcccgacacgcagccgtgcggcgattggctggacgccgctgacgcgtgacggtggtcagcaacttgggcgtaagttccagttgtatgacatgaccagcgaccgtagcgtcaatttccgctaagtcatgggaaaggtgccagttttcgcactcactggcaccttcattcttaatggcctgtcgagccatcaggaacgcagttcactcccggtttgcgatctggtgtgtaaaggcgaaaacattctgtcttcctgtccgtcgatatcggttgcaggtctggttgcctgagcgactgggccatcattgggctggagacattgctttgcggtaggtcggctttatcagcagtaccgagcggaccagcataagcaggaagaacagagactgataacatcaaagcagcaaaataaggcttcatttttaccacctttatcaggttacgtttcatttgttccagaggaacattgtcgatttttcgcgcattgctggtggctgggaatcacctgaatgggtgatttttgaattaccggctttggtgcggtttgtcttgccggatgcgccgccaggcgcggcttatccggcctacgggtaggtatatccggctttggtggaggcgcgctccaaatccaggttgaacaaaacatacacaaaaaatatagatctccgtcacatttttgcgttatacaggaagctcgccactgtgaaggaggtactgctatgacgagtctctctcgtccgcgcgtggagtttatctccaccattttgcagaccgtactcaatcttggcctgctgtgcctcggcctgattttggttgtcttcctcggcaaagaaacggtgcatctggctgatgtgctgttcgcgccagaacaaaccagcaaatatgagctggtagaaggactggtggtttactttctctatttcgaatttatcgcgctgattgtgaagtactttcagtccggttttcacttcccgctacgttactttgtctatattgggatcaccgccattgtgcgcttgatcatcgtcgatcataaaagcccactggatgtgttgatctacagcgctgcgatcctgttactggtgatcaccctgtggctgtgtaatagcaaacggctgaagcgggagtaaaaagtcagcacgccgaaatggcgcggcgtgctggacaggaagattacagcgtagcagtttgttgtgttttcttcgtttccggttcccagagcgcttccagctcctcaagggttttacctttggtttccgggacaaatttccacataaacagtgctgccagaacgcccatacaaccgtaaatccagtaggagaaaccgttgtggaaatgggccaccagccaggagtttttgtccatcatcgggaaggtccaggagacgaagtagttcgccagccactgggccgccaccgcgattgccagcgctttaccacgaatagcattcgggaagatttcgctcagcagtacccagcataccggaccccaggacatggcaaaggcggcaacatagaacagcatgctcagtagcgccacaatacccggtgcctgagtgtaaaacgcggtaccgaggctaaacataccgattgccattccgagtgcgccgataatttgcagtggcttacgaccaaatttatccaccgtcataattgccagaacggtgaaggtgaggttgataactccgacaataatggtctgcaacagcgcgatatccgtgctggcccccagcgttttgaacacttccggcgcgtagtacagcaccacattgatgccgacaaattgctggaagatggagagcattacgccgattacaatcacgcccacgccaaacatcagcagacgaccaccggttttgcggccatgatccagggagtgtttaatttcctgtactgcctgagttgcaagcgtgttgcccataattttgcgcaggataccttccgcctgttcttgcttgccgcggctcatcagccagcgaggactttctggcacggtatacagcagcattaagaacagcagtgcagggatacattcgctggcaaacatataacgccagccgtcagtattcagccagctggcatcaccggaacgggcaataaaatagtttacgcagtaaactaaaagttgcccgaaaataatcgcaaactggttaaaagagaccagtttcccgcgaatatgagctggagccagttccgcaatatacattgggctgagcatactggctaaaccaacgccaataccgccaataatgcgataaataacaaattccgggacataacctgccagataaacaggcacagtgttgtccgggtttatagaggtaaaaccaagttctggccaggcagaacctacaccagaaataaaaaacaggacagcagcaatcttaagactatcacgacgaccgaagcggttactgcaataaccaccgagggcaccgccgatgatgcaaccaatcagagcgctggccacgcaaaaccctaacagggagttggcagcggattcacttaagttttgtggagcaacaaagacggtattgagactctcaacagtaccggaaataacggcggtgtcgtagccaaataataaaccacctaatgtagcgactaaggtaatgctaaatatataactggaattatactgggtattcattcagacctgccttagaccattctgatcttttatcagtgcattgatgttggaattgtcaggcagttaaggcaattatcattttttacaatgcgtttacgtaatgtcttttctgtgatcttaattgtgataattatccaaaattgataaaaacaatactattgccgtgactcagagcacgaaagagaattatcgtaagtgggaaaacaaataacgtaaaaataataagctctatgatggaaatattaaccggcgaacgattcagattgcagacgaaagaaaaaaaggcgctccgtggagcgccgaataacagtcacaagttgggataacgtaagttgagggtgcagcggcataacattggcagaacaacatctttaacctttcacaccacctgccgtcaggccgttgaccagccagcgttgagccagcaagaagacgatggtgatcggtaatgcagacatcacggcagcggcggcaaagtcaccccacaggtagttttgcgggttgaggtattgctgcatccccacggccagggtgtagctgtttacgtcacgcagtaacaggctcgcgaccggaacttcagtaatggcagcgataaagctcaggatgaataccaccgccagaatcggtacactcagcggcaacaggacaaggcggaaggcctgccacggtgtcgcaccatccagcgcagcagcttcttccaggctactgtcgatggtttcgaaatagcctttgatggtccagacatgcagcgcaatcccacccagatacgcgaaaattacgccgccgtgagtattcaggccaatgaatggaatgtactcacccagacgatcaaacaacgcatacaacgcgaccagactaagtactgccgggaacatctggaaaatcagcattcctttcagcagcgtcgctttgcctggaaagcgcatacgggcgaaagcgtaggcgcaggtggtggagagcgccacaatgccaatcgcggaaatcccggcgacctttacgctgttccacagccacagcagtaccgggaatggcggtggcgtaatgcgaccatcagcctgttcaacgctaaaacctaacgccagtttccagtgatcccaggagatttgctccgggatcaggctgccggtcgcaaagtttccctgacgcaggctgatagcgacgaccatcagcagcgggaacataatcgctgcgataaaaagtagcagtagcaggtgagtaataaataaacgagctttttggcttttcggttggaccattgccatttttgttatctcccttaatcaaacttcattcgcgtggctttcaggttcactatcgccagcgcacccaccagcaggaagatcagcgtggcaattgctgccgccagaccgaagtcctgacccccgccgccttcaaaagcgatgcggtaggtgtagttaacaagcaggtcggtataaccggctggcgtggtcgtgccaagacgatccgggccgccgttggttaacagttgaatcagcacgaagttgttaaagttaaaggcgaagctggcgatcatcagcggcgtcagcggtttaatcagcagcggcagcgtaatcttaaagaagttctggaacggacctgcgccatccattgcactggcttcatacaaatcgtccggaatcgctttcagcaagcccatgcagaggatcatcatgtacggataacccagccaggtattgacgataattagcatcgtgcgggcggtggtcggatcgctgaaccaggcgggcttcacgccaaacagcgcgctcaacatcatgttgatttcaccgaagctctggttaaacaaccctttgaaaatcaagatactaatgaagcttggcaccgcgtagggcagaatcagcaggacgcgatagaccgctttgccgcgcaacgcttcccactgcaccagacacgccagaaccatgccgaccgccaccgttaaaaagacagtgatcaggctgaacaccacggtccagacgaaaatggcgaggaacggtttctgaatgccttcgtcggtaaagacgcgggtaaagtttttccagccggtggtcacggtgtaaccggggcttagcttttcatcaccccagttgccgtcggcggtaatggactggtaaaagccaatttggttattcggacgatatttcacgccgctctgattattcgtcaacgtgccgtcaccgtcgagtgtgtagagcggctgcgtgccagaaaactggcgcagggagctcatcatcactttgttgccatccggcagaatggcggtaatgtcactcagcgcctgacgattctgggtaatcacgcgcagattcgcgcgttcgccttcgggctgggcggtcgtttctttcagttgcagtttttgctcgccgccaaatttaaaagcgtcggagaggtaatttttgccggtttcgccgtcgctgagcgccagttgccactcatcgcccgccgggtaaagaccaaagttataggttttgcctgcttgccaggagcgatctaacaacacttcctgcgcacgttcaaaagtcagctggttagtgctgctgtagttggtgaaggcaatggcgatggtgcagaccagagggaagaggacgaataatcccattccagccattcccgggtaaacatagcgccaggcgtaggctttacgattggcgaaaatatacagccccgcactactcaatatcagcgtggtaatggcgaacaggtattccccttgtgcgtacattaaaacaacaaggtaacccaccagcaggccgagcagacctagcacactccatttcagcgcgtcgctttgccaccaatgtttctttttaatgacatccatggggttcttcctcattccaggacggataaggctttcacgccttatccgacaacaactgcctgatgcgacgctgacgcgtcttatcaggcctacatacgtttcggttttgtaggccggacaaggcgttcacgccgcatccggcatttcacagcattacttggtgatacgagtctgcgcgtctttcagggcttcatcgacagtctgacgaccgctggcggcgttgatcaccgcagtacgcacggcataccagaaagcggacatctgcgggatgttcggcatgatttcacctttctgggcgttttccatggtggcggcaatacgtggatctttcgccaactcttcctcgtaagacttcagcgctacggcacccagcggtttgtctttattaaccgcttccagaccttcatcagtcagcagatagttttcgaggaactctttcgccagctctttgttcggactggcggcgttaatacctgcgctcagcacgccaacgaacggtttggatggttgacccttgaaggtcggcagtaccgttacaccataattcactttgctggtgtcgatgttggaccatgcccacgggccgttgatggtcatcgctgtttcgcctttattaaaggcagcttctgcgatggagtaatcggtgtctgcattcatgtgtttgtttttaatcaggtcaaccaggaaggtcagacccgctttcgcgccagcgttatccacgcccacgtctttaatgtcgtacttgccgttttcatacttgaacgcataacccccgtcagcagcaatcagcggccaggtgaagtacggttcttgcaggttgaacatcagcgcgctcttacctttcgctttcagttctttatccagcgccgggatctcttcccaggtttttggcgggttcggcagcagatctttgttataaatcaggcttaacgcttcaacagcgatcgggtaagcaatcagcttgccgttgtaacgtacggcatcccaggtaaacggatacagcttgtcctggaacgctttgtccggggtgatttcagccaacaggccagattgagcgtagccaccaaagcggtcgtgtgcccagaagataatgtcagggccatcgccagttgccgcaacctgtgggaatttctcttccagtttatccggatgctcaacggtgactttaattccggtatctttctcgaatttcttaccgacttcagcgagaccgttatagcctttatcgccgttaatccagattaccagtttaccttcttcgattttggcgagagcgctggcggaaaacatcatcgtcgttaatgcggataatgcgaggatgcgtgcacctgtttttattttcataatctatggtccttgttggtgaagtgctcgtgaaaacacctaaacggactctagtttctttatacggcaacctctttccatcctccttgcccctacgccccaccgtcgctttgtgtgatctctgttacagaattggcggtaatgtggagatgcgcacataaaatcgccacgatttttgcaagcaacatcacgaaattccttacatgacctcggtttagttcacagaagccgtgttctcatcctcccgcttcctcccccataaaaaagccagggggtggaggatttaagccatctcctgatgacgcatagtcagcccatcatgaatgttgctgtcgatgacaggttgttacaaagggagaagggcatggcgagcgtacagctgcaaaatgtaacgaaagcctggggcgaggtcgtggtaagcaaagatatcaatctcgatatccatgaaggtgaattcgtggtgtttgtcggaccgtctggctgcggtaaaagcactttactgcgcatgattgccgggcttgagacgatcaccagcggcgacctgttcatcggtgagaaacggatgaatgacactccgccagcagaacgcggcgttggtatggtgtttcagtcttacgcgctctatccccacctgagtgtagcagaaaacatgagttttggcctgaaactggctggcgcaaaaaaagaggtgattaaccaacgcgttaaccaggtggcggaagtgctacaactggcgcatttgctggatcgcaaaccgaaagcgctctccggtggtcagcgtcagcgtgtggcgattggccgtacgctggtggccgagccaagcgtatttttgctcgatgaaccgctctccaacctcgatgctgcactgcgtgtgcaaatgcgtatcgaaatctcccgtctgcataaacgcctgggccgcacaatgatttacgtcacccacgatcaggtcgaagcgatgacgctggccgacaaaatcgtggtgctggacgccggtcgcgtggcgcaggttgggaaaccgctggagctgtaccactatccggcagaccgttttgtcgccggatttatcggtagcccaaagatgaacttcctgccggtaaaagtgaccgccaccgcaatcgatcaagtgcaggtggagctgccgatgccaaatcgtcagcaagtctggctgccagttgaaagccgtgatgtccaggttggagccaatatgagcctgggtattcgcccggaacatctactgccgagtgatatcgctgacgtcatccttgagggtgaagttcaggtcgtcgagcaactcggcaacgaaactcaaatccatatccagatcccttccattcgtcaaaacctggtgtaccgccagaacgacgtggtgttggtagaagaaggtgccacattcgctatcggcctgccgccagagcgttgccatctgttccgtgaggatggcactgcatgtcgtcgactgcataaggagccgggcgtttaagcaccccacaaaacacacaaagcctgtcacaggtgatgtgaaaaaagaaaagcaatgactcaggagatagaatgatgattactctgcgcaaacttcctctggcggttgccgtcgcagcgggcgtaatgtctgctcaggcaatggctgttgatttccacggctatgcacgttccggtattggttggacaggtagcggcggtgaacaacagtgtttccagactaccggtgctcaaagtaaataccgtcttggcaacgaatgtgaaacttatgctgaattaaaattgggtcaggaagtgtggaaagagggcgataagagcttctatttcgacactaacgtggcctattccgtcgcacaacagaatgactgggaagctaccgatccggccttccgtgaagcaaacgtgcagggtaaaaacctgatcgaatggctgccaggctccaccatctgggcaggtaagcgcttctaccaacgtcatgacgttcatatgatcgacttctactactgggatatttctggtcctggtgccggtctggaaaacatcgatgttggcttcggtaaactctctctggcagcaacccgctcctctgaagctggtggttcttcctctttcgccagcaacaatatttatgactataccaacgaaaccgcgaacgacgttttcgatgtgcgtttagcgcagatggaaatcaacccgggcggcacattagaactgggtgtcgactacggtcgtgccaacttgcgtgataactatcgtctggttgatggcgcaagcaaagacggctggttattcactgctgaacatactcagagtgtcctgaagggctttaacaagtttgttgttcagtacgctactgacagcatgaccagccagggtaaagggctgagccagggttctggcgttgcatttgataacgaaaaatttgcctacaatatcaacaacaacggtcacatgctgcgtatcctcgaccacggtgcgatctccatgggcgacaactgggacatgatgtacgtgggtatgtaccaggatatcaactgggataacgacaacggcaccaagtggtggaccgtcggtattcgcccgatgtacaagtggacgccaatcatgagcaccgtgatggaaatcggctacgacaacgtcgaatcccagcgcaccggcgacaagaacaatcagtacaaaattaccctcgcacaacaatggcaggctggcgacagcatctggagtcgcccggctattcgtgtcttcgcaacctacgccaagtgggatgagaaatggggttacgactacaccggtaacgctgataacaacgcgaacttcggcaaagccgttcctgctgatttcaacggcggcagcttcggtcgtggcgacagcgacgagtggaccttcggtgcccagatggaaatctggtggtaatagcaaaacctgggccggataaggcgtttacgccgcattcggcaaccaacgcctgatgcgacgcttgcgcgtcttatcaggcctacaacggctgtcaaatgtaggccggataaggcgtttacgccgcatccggcataaaaacaggttgtcattatctgaaaggggcgaaagcccctctgattatcgggtttagcgcgctattgcctggctaccgctgagctccagattttgaggtgaaaacaatgaaaatgaataaaagtctcatcgtcctctgtttaagtgcagggttactggcaagcgcgcctggaattagccttgccgatgttaactacgtaccgcaaaacaccagcgacgcgccagccattccatctgctgcgctgcaacaactcacctggacaccggtcgatcaatctaaaacccagaccacccaactggcgaccggcggccaacaactgaacgttcccggcatcagtggtccggttgctgcgtacagcgtcccggcaaacattggcgaactgaccctgacgctgaccagcgaagtgaacaaacaaaccagcgtttttgcgccgaacgtgctgattcttgatcagaacatgaccccaagtgccttcttccccagcagttatttcacctaccaggaaccaggcgtgatgagtgcagatcggctggaaggcgttatgcgcctgacaccggcgttggggcagcaaaaactttatgttctggtctttaccacggaaaaagatctccagcagacgacccaactgctcgacccggctaaagcctatgccaagggcgtcggtaacagcatcccggatatccccgatccggttgctcgtcataccaccgatggcttactgaaactgaaagtgaaaacgaactccagctccagcgtgttggtaggacctttatttggttcttccgctccagctccggttacggtaggtaacacggcggcaccagctgtggctgcacccgctccggcaccggtgaagaaaagcgagccgatgctcaacgacacggaaagttattttaataccgcgatcaaaaacgctgtcgcgaaaggtgatgttgataaggcgttaaaactgcttgatgaagctgaacgcctgggaagcacatctgcccgttccacctttatcagcagtgtaaaaggcaaggggtaattacgccccacagtgctgattttgcaacaactggtgcgtctcctggcgcacctttttttatgcttccttcctgggatatgagcgattttttatagtaactcacttcttcttcactaagaatatccattatctcaatgccttatcagagattcttttcctttcgccggtagtgtctggacattcaggctacttttccaggttattttatttctgttatgcagaggttttatgataagtcatatcctaaattctggcggcaataactctttgatgaaacatgatgtggtgcaaggaaataatatagtagatcttgatttactacgtaatttaaatggggtgccaggtttaaacagagataactttatttatatcagcaatattttttcaaatataaaacaacggaacgaaaaaatcatgcaataaatatgtttcgtgaagtctcaatcagtaatgatactataagtgtaaaattctacagaaatgaaaaaaattgaatgcgcttgcaattttctgatggataaagatgcgcaggggtatatcgacctgtctgatttggatttaacaagttgtcattttaaaggtgacgttataagcaaggtgtcttttttaagtagtaatctacaacatgtaacattcgaatgtaaagaaattggggattgcaattttactactgcaatagttgataatgtcatatttagatgtcgacgtttacacaatgtgatttttatcaaagcgagtggtgaatgtgtcgatttcagcaaaaatattcttgatacagttgacttcagccagagtcaacttggtcatagtaattttcgcgaatgtcagattagaaatagtaacttcgataattgttatctttacgctagccacttcaccagagcagagtttctgtctgccaaagaaataagttttattaaaagcaatttgacagctgttatgtttgattatgtgcgaatgagcacagggaattttaaagattgcattacagaacaattggaattaactattgattatagtgatatattttggaatgaagatctcgatggttatatcaataacattataaaaatgattgatacattgccagataatgcaatgatattgaaatccgttctggccgtaaaactggtgatgcaattaaaaatacttaatattgttaataaaaactttattgagaatatgaagaaaatatttagccattgtccttatataaaagatcccattatacgcagttatatccattctgatgaagataacaagttcgatgattttatgcgtcaacatcgattcagtgaggtgaatttcgatacccaacagatgatcgattttattaacagatttaatacgaataaatggctaattgataaaaataacaatttttttatccaacttatcgatcaggccttacgaagtacggatgatatgatcaaagcaaatgtttggcatctttataaagagtggattcgtagtgatgatgttagtcctatatttatagaaactgaagataatttaagaacctttaacacgaatgaattaacacgaaacgataatatctttatcctgttctccagtgtcgatgatgggccagttatggtggtaagctcccagcgcttacatgatatgttgaatcctacaaaagataccaattggaattccacgtatatctacaaatccagacatgagatgttgcctgttaatcttactcaggaaacacttttcagctccaaatctcatggtaaatatgcgcttttccccatttttactgcgagttggcgagctcatcgtataatgaataagggtgtttaagtaaaggaaaacatcaccgttcctggcatcctggacggtgatgcccctacggttgccctcgccagcacgggcatcggtaaagcgtaaggttcaacatcgttttaccacttcatgcgattgttgcgtttttgttgcgtattagatcacttaatttgctttacatctcccgtaaacacttttctgcgatacaatgcctttacgttatgtaacggagagttcggcatgagtcaccccgcgttaacgcaactgcgtgcgctgcgctattgtaaagagatccctgccctggatccgcaactgctcgactggctgttgctggaggattccatgacaaaacgttttgaacagcagggaaaaacggtaagcgtgacgatgatccgcgaagggtttgtcgagcagaatgaaatccccgaagaactgccgctgctgccgaaagagtctcgttactggttacgtgaaattttgttatgtgccgatggtgaaccgtggcttgccggtcgtaccgtcgttcctgtgagtacgttaagcgggccggagctggcgttacaaaaattgggtaaaacgccgttaggacgctatctgttcacaagtagcacattaacccgggactttattgagataggccgtgatgccgggctgtgggggcgacgttcccgcctgcgattaagcggtaaaccgctgttgctaacagaactgtttttaccggcgagtccgttgtactaagaggaaaaaaatatggagtggagtctgacgcagaataagctgctggcgtttcatcgcttaatgcgtacggataagccaattggcgcgttactgctgctctggccaacattatgggcgttgtgggtggcgacaccgggcgttccccagctctggatcctggcggtgtttgtcgcgggtgtctggctgatgcgcgctgccggatgtgtggtgaatgattatgctgaccgcaagtttgatggtcatgttaagcgcacggcgaaccgaccacttcccagcggcgcggtaacagagaaagaggcgcgcgcgctgtttgtcgtgctggtactgattagctttttactggtgctgacgctgaatacgatgaccattctgttgagcattgccgcgctagcgctggcgtgggtgtacccgtttatgaagcggtatacccatctaccgcaagtggtgctgggcgcggcgtttggctggagcattccaatggcttttgccgctgtgagtgagagcgtgccattgagttgctggttaatgttcctcgccaatattctctgggcggtggcttacgacacgcagtatgcgatggttgaccgcgatgatgatgtgaagattggcattaaatccacggcaatcctgttcggccaatacgataaattgattattggtattttgcagattggcgtactggcactgatggcgatcatcggtgagttaaatggcttaggctggggatattactggagtattctggtggctggcgcgctgtttgtttatcaacaaaaactgattgccaaccgcgagcgtgaagcctgctttaaagcatttatgaataataactatgttggtctggtactatttttagggctggcaatgagttactggcatttctgatgatgtaaaaaagccggatgatcatccggctttcttctgggttgcctgatgcgcggcgcttctcaggcctacacaacacatcgcaatttattgaatttgcagattatggaaggccggataaggcgttttcgccgcatccggcaattctctctgattacccttcgccctgcgtcgcactctcaatcgtcaaacgcacgtcacttgtaatcaactccgccagcaactgataaaccttcatcgtttctgccggttcggcatcgccgctatcgctgatatacccttcatcacgcagtgtcagcaccagagaactgaacaccgccttgtcgaagaactccggcgcgttgatgccgtgcagcacggagagacgttgcgcgacggtgcggctctctttctccagcgtaccgcggttgatgctcgggttggcactcaacaaccagaaggtgatggcataacgttgcagcgtttcgcgcgcgcctgcggccagcagctgtagcgtgcgagaatgcgccgggttgatatgcaactcatcatcttgcagggtaatcagcccctgacgttgcatctcatttgccagcgcatcaataacgtccggcaactcgtcgcgatcccagcgcaggaacagctccgctttcagcattgggtaaagcacattgacgtgctccatcaatacgtcgcgggagatgtggcgatgctgggtgacgattgccgccatcaggctaggcagcaccaacatatgcgcaatgttgttgcgatagtaggtcatcagcaccgcttgctcgcgcggcagaatgatgatgtcgccgattgtgtctttctcgacttcaaacttgttcatttgcagcgcgtgatcgataagctcgctggcgctggcactaggaacggtagagtccgtggagtagggcacgttgcgcatcagatccaggtagcagttgagttgctcggttaactgctcgcgggtgagactgcgctgacgacttgccagtagcgcagtacagcacaggttcatggcgtttgccgcgcctgcgttgttaatgcgtaccatcagatcggcagcaatattattgaccgtcggcgttaaccatgccggacgcaccgcttcgatgggatcgatagattcacgccagtcaggtacatgctggttaaggtaggtcatcaacggcattggttcaccgaagttgacgtaaccctgaccgagattacgcagcttgcttaaaccgcgcagcatctgcggcaggctctctttctctttcgtcgcgccgcgcagttctttggcgtaagtacccacttccatgacgtgctcataaccgatatagatcggaatcagcgtaatcggacgcgtgccgccacgcagcatcgcctgaatggtcatgctcagcgtaccagttttcggatccagcaaacgccccgtacgggaacgaccgccttccacgaagtactcgacggaataaccacggctgaacagttcgccgagatactcccggaaaacggtggaataaagtttattgcctttaaacgtacggcgaataaagaacgcccccagacggcggaaaatcggcccggcaggccagaaattcaggttgatcccggcggcgatatgcggcggcaccagcccctggtgatacagcacgtaagaaagcagcaggtagtccatgtgactgcggtggcaaggcacatataccagctcatgaccgtcgtgggccagctggcgaacgcgctcagcgttatggacgttgatgccctggtaaagtcggttccaggtgaagcccagaatacggtcagtcaggcgaatcatctcgtaagagaaattcgccgcaatctcttccatcagtgcaatcgcgttctgctgcgctttttcatgggagatttttttgctgcgcgcttcatcttctaccgctttggcaatggcgcgggaggcgagcagcttattaaacagatcctgacgagcaggcaaacgtgggcctacggcagccagacgttgacgggcaaagtgcatacgcgccacgcgcgccagtttctgagcgatagttttatccgtgccgtgttcatccgccatacggcgcaggctaacactcgggctgaaacgcacaaaactgtcgcgaccgagccacagtacagcgaaaaatttctgtacgccgttaagcatacgcagcggcgggttcacttcgcctttttcacgccccggcgcgcgaccaaacatcacgctcactggcaccatctgcacatccagatttgggttgctacggtgcaaatcgagatagtcgtggaacagcttaatagactcttctttcggcgtgtaataggtgaacacacgcggcccgccgtgaatgaacacatagcgcggcagtagcgtgccgtcgatttccagcggctctaacgggtcaggcaagtcatgtgccagacactgggcgcgcaacgtcagcaaatctgctttgctgttgtacggtaaaacgtacataattggacgagaggtatccagccccagttccggggcaggatctgccggaatagacttgctttttaccaggatgcttaatggtaaattcagtaatttgtagtaaattcgtggccagccggacataaacgatgtaaagcctctggttaataatgcaaatgcgcggcaaggatagcagaaagtcatgggaaattctgtggtatccgctcatgtttcgcgcggcgctacgcaaacccgaatcatcggatttaacggtacactgatattgacgctcataatgtaaaaaggttctttcaatggccaataataccactggattcacccgaattatcaaagctgctggctattcctggaaaggtttacgcgctgcatggatcaacgaagcggcattccgtcaggaaggcgtagcggtattgttggcggtggtcatcgcctgctggctggatgtggacgcgattacccgcgtgctgcttatcagctccgtgatgctggtgatgattgtggaaatcctcaatagcgccatcgaagcagtggttgaccgaattggctctgaataccatgagctttccggacgcgcaaaagatatgggatccgctgcggtgctgattgccattatcgtcgccgtgattacctggtgcattctgttatggagccattttggataacccttccagaattcgataaatctctggtttattgtgcagtttatggttccaaaatcgccttttgctgtatatactcacagcataactgtatatacacccagggggcggaatgaaagcgttaacggccaggcaacaagaggtgtttgatctcatccgtgatcacatcagccagacaggtatgccgccgacgcgtgcggaaatcgcgcagcgtttggggttccgttccccaaacgcggctgaagaacatctgaaggcgctggcacgcaaaggcgttattgaaattgtttccggcgcaagtcgcgggattcgtctgttgcaggaagaggaagaagggttgccgctggtaggtcgtgtggctgccggtgaaccacttctggcgcaacagcatattgaaggtcattatcaggtcgatccttccttattcaagccgaatgctgatttcctgctgcgcgtcagcgggatgagcatgaaagatatcggcattatggatggtgacttgctggcagtgcataaaactcaggatgtacgtaacggtcaggtcgttgtcgcacgtattgatgacgaagttaccgttaagcgcctgaaaaaacagggcaataaagtcgaactgttgccagaaaatagcgagtttaaaccaattgtcgttgaccttcgtcagcagagcttcaccattgaagggctggcggttggggttattcgcaacggcgactggctgtaacatatctctgagaccgcgatgccgcctggcgtcgcggtttgttttagttctctcttcatcaggcttgtctgcatggcattcctcactagttctgataaagcactctggcatctcgccttacccatgattttctccaatatcaccgttccgttgctgggactggtcgatacggcggtaattggtcatcttgatagcccggtttatttgggcggcgtggcggttggtgcaacggcgaccagctttctctttatgctgttgctgtttttacgcatgagcaccaccgggctgactgcgcaggcttatggtgccaaaaatcctcaggcattagcccgtacgctggtgcaaccgttgctgttggcgttgggggctggggcgttaattgcgctgctgcgtacgccgattatcgatctggcgctgcatattgttggcggtagtgaggcagtcctggaacaggcgcggcgctttcttgaaatccgctggttaagcgcaccggcgagcctggcgaatctggtattactcggttggttactcggcgtgcaatatgcccgtgcgccagtaattttgttagtggtcggcaatatcctcaacattgtgctggatgtctggctggtgatggggctgcatatgaacgtgcagggcgcggcgctggcgacggttattgcggaatatgcaacattgctgattggtctgctaatggtgcgtaaaatcctcaaactacgcggaatttccggcgaaatgctgaaaactgcctggcgaggaaacttccgtcgcttgctggcgcttaaccgcgatatcatgctgcgtagcctgttgttgcaactctgtttcggcgcgatcaccgtacttggcgcgcgactggggagtgacattatcgctgttaacgcggttctgatgacgctactcacctttaccgcctatgcgctggatggttttgcctacgcggttgaagcgcactccggtcaggcatacggtgcgcgcgacggtagccagttgctggatgtctggcgggcagcgtgccgccagagcgggatcgtagcgttactgtttagcgtggtttatttgctggctggggaacacatcattgcgttactgacgagcttaacccagattcagcagctggctgaccgctatcttatctggcaggtgattttgccggtggttggcgtctggtgttatctgctggacggcatgtttataggcgcaacgcgtgccaccgaaatgcgtaacagtatggcggtggccgccgcaggttttgcgctgacgctccttacgctgccgtggctgggtaatcatgctttgtggctggcattaaccgtctttctggcgttgcgcgggctttctctggcggctatctggcggcgtcactggcgcaatggtacctggtttgccgcaacgtgacggttaaaaattctgaataaataatcctaagccaaattgctgactacacttaatctcacgttcagaagaaaagtgaacgtactctcattcacaacctaacgatgaggtcttgattatgaataaagatgaagccggcggtaactggaaacagtttaaaggtaaagtgaaagagcaatggggcaaactgaccgatgatgatatgacgatcattgaaggtaaacgtgatcaactggtcggtaaaatccaggaacgttatggttatcagaaagatcaggcagaaaaagaggtcgtggattgggaaacccgcaatgaatatcgctggtaattaatccctcctgcccgacgtgtacaaggatgtacgccctcttaacgcggtttctttttcacctgcacagagtgatcatgctggcactgttcaggatgacgacacgcttccacttctacacatgccgcacagagcccatgtgcttcaatcacattatgccgcagggcaaaccccatttttgccgccagcgtatgcataatgtcttccacgccttctgcacactcttctttcactgcgccgcagcgatcgcaaataaacatggcactcgtatgggtgggctgatcgaacagatgacagagcacataactgttggtggattccaccttatgcacaaaaccttgctcaagcagaaaatccagcgcgcgataaaccgttggcggcttggcttgcggttcagcttcgcgcagtaaatcaagcagatcataagcgctgatagcgccatcctgcagactcatcaggcgcaacacttccaggcgctgtggggtcaggcgcacattacgctgcgcgcagattttttcagcctgcgctaataactcctgcgttgtggtcttttccatcgggcacctcaaagtgggggttaagaatgtccttactttaccatgttccaggaaaaacaccgagaacccttattgttgccgtaatgttgattttctgctttgtaggtaaggtgttatgttgccttgtcgtaccattatcaacacgataataattaataattcatttttaaataaattgcttcaagttaactcgctatttatttaactgggtttaaacgcatacctgtagttcagaaattatgagcgatttttgatagtgaccagatggcaaaagaattataaggaggacacggtacgacaaaaaaggtagatgaatcatgttgaagataatacccggtgcaactggatactttaataaaacactcaatagtaatcaattcgataatgaagatgcaatcaaagataaattagataatagaggtagtatcaaaggtaaattaaataatatatatggtaaatctattgattatgcagcgctgcgtcatcgggatataattattgcaaaaatagatttgtttattcaacgaatcacgcataatttatggcatgcacgtaaaaaaatgtgtttttaattgtgcaaataaatgatctcaaaatgtgggtcaataagtatattgacgattgcactgatgaggatttaaacgatcgtgactttattgcaagtgttgttgaccgggctatttttcatttcgcgattaatagtatatgtaatcctggggataataaagatgcaatgcccattgaacaatgtacttttgatgtagaaactaagaatgaccttccctccacggttcagctattttatgaggaatctaaggataatgaacctttagcgaatatacattttcaagcaataggttctggttttttaacgtttgttaatgcctgccaggaacatgatgacaacagcttaaaattatttgctagcctgttaattagtcttagttattctagtgcctacgcagatttaagtgaaacagtgtatattaatgaaaataatgagagctacctgaaagctcagtttgaaaaattatctcaacgtgatatgaagaagtacctgggagagatgaagcgtctggctgatgggggagaaatgaattttgatggctatctggataagatgagtcatctggtgaatgaaggaacgctcgatcctgatattttaagcaaaatgcgagatgctgcaccacaattaattagcttcgcgaagagctttgacccaaccagtaaggaagagattaaaatacttacagacacttctaaattaatttatgatttgttcggggttaaaagcgagaaataatatgtgaagttcttcgatagtatggaaggcattatataaaaggacccaatatttattgggttcttttttctctatcaatactattagcagggagatatatcaccagagtttaatgtgtgattttttatttatcgtcgaacctggattgtttatcattggccttaacaaagttaacggctaataagattatttccatcacttcgtgagagcttcatgccttgagaggatctcaattttcttttgcaatgagacaggcgcttcctgttgttatggtatagtaccccgctattgagcctcctgaatagtgatgctgaataacataaccccatgatatatcgataaaataatctctacatttgaaaatgcacggtaattctgaaatgcaaaaaatcaaccaaaccagcgcaatgcctgaaaaaactgacgttcactggagtggtcggtttagcgttgcaccaatgctcgactggacggacagacattgccgctatttcttgcgtctgctttcccgcaatacgttgctgtataccgaaatggtgaccacaggggcgattattcacggtaaaggtgattatctggcgtacagtgaagaagaacatccggtagcgttgcaactgggcggtagcgatccggcggcgctggcgcagtgtgcaaagctggcagaagcgcgcggatatgatgagatcaacctgaatgtcggctgcccgtctgaccgggtgcagaacggcatgtttggtgcgtgtctgatgggtaatgcgcagctggttgccgactgcgtgaaagcgatgcgcgatgtggtgagcattccggtgacggtgaaaacgcgtattggcatcgacgaccaggacagctatgaatttctctgcgatttcatcaataccgtttccggcaaaggcgagtgtgagatgttcatcatccacgcacgtaaagcctggcttagcgggttaagcccgaaagaaaaccgtgaaatcccgccgctcgattatccgcgtgtgtatcaactgaagcgtgactttccgcatctgacaatgagcattaacggtggtatcaagagcctggaagaggccaaagcacacctgcaacatatggatggcgtgatggtcgggcgcgaggcgtatcagaatccgggtattctggcggcggtagaccgggagatctttggttccagcgataccgatgccgatccggtggcggtagtgcgcgccatgtatccgtacattgagcgtgaactcagccaggggacgtatctcggccatattacccggcatatgttgggcttgttccagggtattcctggcgcgcggcagtggcggcgttatttaagtgaaaatgcccataaagcgggtgcagacattaatgtgctggaacacgcgctcaaactggtggcggataagcgttaacttttcaccaaaaagtagtcaaattcaccacgccctgcgcaccgtcgcggggcgttttgctgttaaatcaatagattatttttggcatgattcttgtaatgccagcaagagatttcatatttgggagagcatcatgctggaactactttttgtgattggcttttttgtcatgctgatggtcaccggcgttagcttgctgggcattatcgccgcgctggttgtggcgacggccattatgttcctcggcggtatgctggcattgatgattaagttgctgccgtggttactactggcgattgcggtggtgtgggttattaaggcgattaaagcaccaaaagtgccgaaatatcagcgttatgaccgctggcgttactaagggattgtgcggatgatcacaacctaaggttttatccttagaacaaaataggaattaataatcaaatctgtcactattgcgcctctaacagattcatcgtgctgtaccctacatacagccgaactataaaaagaaagggcttcccaggtggaagccctatttcttttatggaatcagcaggctggaaccttgcgtcgcccggctttccagaatctcatgcgcacgctgcgcatccttcagcggatatttctgctgctcggcgacatcgaccttaatcacaccgctggcaatcaaagagaacagttcattactggcctcggttaattcctcccgcgtggtgatatagccttgcagggaagggcgtgtcacatacaagctgcctttttgattgagaatgcctaagttcacaccggtaaccgcaccactactgttgccaaaactgaccattaagccgcggcgttgcaggcaatccaggctccgttcccaggtgtctctgcccacggaatcgtacaccacgcgcactttcttaccgccggtgatctcttttaaccgctcgaccagatcctcttcacgatagttaataacctgccacgcgcccgcttttagcgcgctctgcgctttttgcgcggttcctacggtgccgataagtttcgcgcccagggcttttgcccactggcaggcaattaagccaacgccgccagccgctgcgtggaacaggaactgttcatcgggtttaatttcataggttttgcgcagcagataataaaccgttaagcctttcaggaaggatgccgcagcttgctcaaaagaaattgccgcaggcagaatcgccgctttatccgcaataatgttatgcacagagctgtaagcgcctaacgcgctctgcgcatagactacacgatcgcctgccttaatatgctttacaccactgccgactttactcacgatgcctgctgcttcggtgcctaatccgctgggtaggcttggcggcgggtaaaggccgctgcggatatatgtgtcgataaaattgatgccgatggctttattttcgacctggatttcattctccgccggatcggcaggagtgaactctacggcttgaagtacttccgggccaccgtgcttgtgaaattcaattcgtgttgccatgtgtcctccagaacgtatcgtcagggtctgcttcatatgataaagtttcgacccattctttatctcggtaactccattcactatggcaggaaataaacccttcaacaaacagcaggctgaaccccgcgaacgcgatccacaagttgccgggctgaaagtgcctccgcacagcatcgaagcggagcagagcgtgttgggcggtttaatgctagataacgaacgctgggatgatgtagccgagcgtgtggtagcagacgatttttacacccgcccacaccgtcatatctttactgaaatggcgcgtttgcaggaaagcggtagccctatcgatctgattactcttgcggaaagcctggaacgccaggggcaactcgatagcgtcggtggttttgcttatctggcagagctgagtaaaaatacgccaagtgcggctaacatcagtgcctatgcggacatcgtgcgtgaacgtgccgttgtccgtgagatgatcagcgttgcgaatgagattgccgaagctggttttgatccgcaggggcgtaccagcgaagatctgctggatctggctgaatcccgcgtctttaaaattgccgaaagtcgtgcgaacaaagacgaagggccgaagaacatcgccgatgtgctcgacacaaccgtggcgcgtattgagcagttgtttcagcagccacacgatggcgttaccggggtaaacaccggttatgacgatctcaacaaaaaaaccgctggcttgcagccgagcgatttgatcatcgtcgccgcgcgtccgagcatgggtaaaacaacatttgcgatgaacctcgtcgaaaacgcggcgatgttgcaggataaaccggtacttatcttcagcctggagatgccaagtgaacagatcatgatgcgttctctggcgagcctgagccgcgttgaccagactaaaatccgtaccgggcagctcgatgacgaagactgggcgcgcatttccggcaccatgggtattttgctcgaaaaacgcaatatctatatcgatgactcctccggcctgacgccaacggaagtgcgttcccgcgcacgccgtattgcccgtgaacacggcggcatcgggcttatcatgatcgactacctgcaactgatgcgcgtaccggcgctttccgataaccgtacgctggaaattgcagaaatctctcgcagcctgaaagcactggcgaaagaactgaacgtgccggtggtggcgctgtcccagttgaaccgttctctggaacaacgtgccgacaaacgcccggtcaactccgacctgcgtgaatctggctctatcgagcaggatgcggacttgatcatgtttatctatcgtgatgaggtgtatcacgaaaacagtgatttaaaaggcatcgcggaaattattatcggtaaacaacgtaacggcccaatcgggacggtacgcctgacctttaacggtcaatggagccgcttcgacaactatgcggggccgcagtacgacgacgaataataattattttatgaattaggtaattaaagcaaacacttatcaaggaacacaaatgcaagcggcaactgttgtgattaaccgccgcgctctgcgacacaacctgcaacgtcttcgtgaactggcccctgccagtaaaatggttgcggtggtgaaagcgaacgcttatggtcacggtcttcttgagaccgcgcgaacgctccccgatgctgacgcctttggcgtagcccgtctcgaagaagctctgcgactgcgtgcggggggaatcaccaaacctgtactgttactcgaaggcttttttgatgccagagatctgccgacgatttctgcgcaacattttcataccgccgtgcataacgaagaacagctggctgcgctggaagaggctagcctggacgagccggttaccgtctggatgaaactcgataccggtatgcaccgtctgggcgtaaggccggaacaggctgaggcgttttatcatcgcctgacccagtgcaaaaacgttcgtcagccggtgaatatcgtcagccattttgcgcgcgcggatgaaccaaaatgtggcgcaaccgagaaacaactcgctatctttaataccttttgcgaaggcaaacctggtcaacgttccattgccgcgagcggtggcattctgctgtggccacagagccattttgactgggtgcgcccgggcatcattctttatggcgtcagcccgctggaagatcgctccaccggtgccgattttggctgtcagccagtgatgagtctaacctccagcctgattgccgtgcgtgagcataaagccggagagcctgttggttatggtggaacctgggtaagcgaacgtgatacccgtcttggcgtagtcgcgatgggctatggcgatggttatccgcgcgccgcgccgtccggtacgccagtgctggtgaacggtcgcgaagtaccgattgtcgggcgcgtggcgatggatatgatctgcgtagacttaggtccacaggcgcaggacaaagccggggatccggtcattttatggggcgaaggtttgcccgtagaacgtatcgctgaaatgacgaaagtaagcgcttacgaacttattacgcgcctgactagtagggtcgcgatgaaatacgtggattaatcgttctgtaatatttgattgtctgtgccggatgcggcgtgaatgccttatccggccaataaaatcctaaaaattcaataagttgatgttctttcatgctcttataaaggtcgtgcctctggcggatgtacgtttgtcatgagtctcactctgttgctaattgccgttcgctcctgaacatccactcgatcttcgccttcttccggtttattgtgttttaaccacctgcccgtaaacctggagaaccatcgcgtgtttcaaaaagttgacgcctacgctggcgacccgattcttacgcttatggagcgttttaaagaagaccctcgcagcgacaaagtgaatttaagtatcggtctgtactacaacgaagacggaattattccacaactgcaagccgtggcggaggcggaagcgcgcctgaatgcgcagcctcatggcgctagcctttatttaccgatggaagggcttaactgctatcgccatgccattgcgccgctgctgtttggtgcggaccatccggtactgaaacaacagcgcgtagcaaccattcaaacccttggcggctccggggcattgaaagtgggcgcggatttcctgaaacgctacttcccggaaagtggcgtctgggtcagcgatcctacctgggaaaaccacgtagcaatattcgccggggctggattcgaagtgagtacttacccctggtatgacgaagcgactaacggcgtgcgctttaatgacctgttggcgacgctgaaaacattacctgcccgcagtattgtgttgctgcatccatgttgccacaacccaacgggtgccgatctcactaatgatcagtgggatgcggtgattgaaattctcaaagcccgcgagcttattccattcctcgatattgcctatcaaggatttggtgccggtatggaagaggatgcctacgctattcgcgccattgccagcgctggattacccgctctggtgagcaatagcttcagcaaaattttctccctttacggcgagcgcgtcggcggactttctgttatgtgtgaagatgccgaagccgctggccgcgtactggggcaattgaaagcaacagttcgccgcaactactccagcccgccgaattttggtgcgcaggtggtggctgcagtgctgaatgacgaggcattgaaagccagctggctggcggaagtagaagagatgcgtactcgcattctggcaatgcgtcaggaattggtgaaggtattaagcacagagatgccagaacgcaatttcgattatctgcttaatcagcgcggcatgttcagttataccggtttaagtgccgctcaggttgaccgactacgtgaagaatttggtgtctatctcatcgccagcggtcgcatgtgtgtcgccgggttaaatacggcaaatgtacaacgtgtggcaaaggcgtttgctgcggtgatgtaatgcaggaaagcaggctggagctacccagcctgcagtgaaattaaactgtcgtcgctttcactctttctttatagatgatttttttgatgccatcgttctacgtgagagataataaacgttgttagttcttttattgttaagcttatcccaattatctggaattccttatcctgtttttttgggtggagtaataatttctgcacatctaaccattattaaatttaataataagtatcgggtttgttacgatagaatatttctatatcctcaagaatatgctttgccttattgcctgtgactttctgagattcaattatagtatcgttaaattctaatgttaaagagaactcttttttccgctttgtgtaagtttaaccttatattgattaccaatatcaaataaaaaggtcctgtaatgagaataatcacctttaacctcctcggcaaaacagcaaagcgtgcaaatatacataaagtctttcttacccctgattttgttaactaaatcaataaatgcgtgaaaaactttacttgcaatagaacttgatacttcttctccaggtctaaaaaatcttttgcaatttttaactgtgtttctatgtataaaaagaaatctttggcataagagatatctttattatttagtgcatctagctcaacaggtaaagatgtcgttttgttgctattcacatatgatatattcatatcatcatctccatcgcgagtaataaaattaatcaccattgtagggtagggggctggtcaatcagaaatcatctttataaacttcgattgtttttgtaatgctgtatcattaagttcattaaatcgtacagcagataaatgttctatcaaatttcgctcatttgccgaggattcatcataataaacgtaaaattaatgtatccttacatcgagtaataaacattttttatacaaaaaaagacaggaacgtatttactgggttaaatataatcatcctgcttttcatcacaaaaaccgcagataatccttcctttccccggcagctggcgttatggtcagatggtttttgcaacaaatctcacaataaaaagtttcaacatactgactatttagggaaaaatatgcgcaagatcacacaggcaatcagtgccgtttgcttattgttcgctctaaacagttccgctgttgccctggccagttctcctagtccgcttaaccctgggactaacgttgccaggcttgctgaacaggcacccattcattgggttagcgtcgcacaaattgaaaatagcctcgcagggcgtccgccaatggcggtggggtttgatatcgatgacacggtacttttttccagtccgggcttctggcgcggcaaaaaaaccttcagcccagaaagcgaagattatctgaaaaatcctgtgttctgggaaaaaatgaacaatggctgggatgaattcagcattccaaaagaggtcgctcgccagctgattgatatgcatgtacgccgcggtgacgcgatcttctttgtgactggtcgtagcccgacgaaaacagaaacggttagtaaaacgctggcggataattttcatattcctgccaccaacatgaatccggtgatctttgcgggcgataaaccagggcaaaatacaaaaagccaatggctgcaggataaaaatatccgaattttttatggcgattctgataatgatattaccgccgcacgcgatgtcggcgctcgtggtatccgcattctgcgcgcctccaactctacctacaaacccttgccacaagcgggtgcgtttggtgaagaggtgatcgtcaatagtgaatactgacagagcgggagagcgtgatgctctcccgaatgctgtttttttaatcacacctttatcctttcgctgtcttgctgcaaactgattaagagagttttatcaaggagcagcacatgtggtatcaaaagacgctcacgcttagcgccaaatctcgtgggtttcatctggtaacggatgaaattctgaatcagctggctgatatgccgcgcgttaacatcggcttactgcatctgttgctgcaacatacctccgcctctctgacacttaatgagaactgcgatcccaccgtacgccacgacatggagcgttttttcctccgcaccgttcccgacaacggaaattatgagcatgactatgagggagcagacgatatgccttctcatatcaaatccagtatgctgggaacaagccttgtattgccggtgcataaagggcgtattcagaccggcacctggcaaggcatttggctgggggaacatcgcatccacggcggaagccgtcgcatcatcgcgacactacaaggggagtaaaaaatgaccattagcgagttgctacaatattgcatggcaaaaccaggcgcagaacagagcgtgcataatgactggaaagcgacgcagatcaaagtggaagatgtactgtttgcgatggtgaaagaagtagaaaatcgcccagctgttagcctgaaaaccagcccggagctggcggagctgctacgtcagcagcacagcgatgtgcgtccaagccgccatctgaataaagcgcactggagcaccgtgtatctcgacggtagcctgccagatagccaaatctattatctggtggatgcgtcttatcagcaggcggtgaatttactgccggaagaaaaacgtaaattgctggtgcaactctgaaaggaaaaggccgctcagaaagcggccttaacgattacagcatcggcttaaggaagcgtgccgtgtgacttgcttcgcactccgcgacggtttctggcgtaccggagacgaggatctcgccgccaccactgccgccttctggtcccaggtcgacaatccagtcagcggttttgatcacgtcgagattgtgctcaatcaccacaatggtgttgccctgatcgcgcagtttatgcagtacgtcgagcagttgctgaatatcggcgaagtgcagaccggtggtcggctcgtcgagaatatacagcgtctgcccggtgccgcgtttactcagttcacgcgccagcttcacgcgctgggcttcaccgccactaagggtggttgcggactgccccagtcgaatgtacgtcaggccaacgtccatcaacgtttgcagcttacgcgccagtgcaggtacggcatcaaagaactcacgcgcctcttcgatggtcatatccagcacttcgtggatggttttgcctttgtacttaatctccagcgtttcacggttatagcgtttacctttgcactggtcgcacggcacgtagatatccggcaggaagtgcatctccactttgatcacgccatcgccctgacaggcctcgcagcgtccgccacgaacgttaaagctgaaacgtcccggcgtatagccgcgcgcacgggattccggtacgcccgcaaacagttcgcgcacaggcgtaaacacgccggtataggtcgccgggttagaacgtggagtacgaccaattgggctttggtcgatatcgatcactttatcgaaatgctccagcccctgaatatcgcgatacggtgctggttcggcgatggtcgccccattcaactggcgttgggcaatcgggaacagtgtgtcgttaatcagcgtgcttttaccggaaccactaaccccggtgatgcaggtaaacagacccaccggcagcgtcagcgtcacgtccttcaggttgttgccgcgtgcgcctgtcagcttcagcactttttccggattcgccggaacgcgtttcttcggcacttcaatcttgcgtttgccgctcatgtactgcccggtcaagctctccggcaccgccataatcgcttccagcggaccttctgcgaccacttcaccgccgtgaacacctgcgcccgggccaatgtcgatcacatggtcagcggcgcgaattgcgtcttcgtcgtgctccaccacaatcacggtattaccgagatcgcgcagatggataagcgtacccaacaggcgctcgttatcacgctggtgcaggccgatagacggctcgtccagcacgtacataacgccaaccaggcccgcaccaatctggctcgccagacggatacgctgtgcttcaccgccagaaagcgtttctgcgctgcgggaaagcgtcaggtaattcaggccgacgttaacgaggaatttcagacgatcgccgatctctttaaggattttttctgcaatcttcgcccgctgacctgcgagtttgagattgttgaagaattccatcgcatgaccaatgctcatgtcggagatagcaggcagcggcgtattctcgacatacacgtggcgcgcttcccgacgcagacgcgtcccttcgcagctggcgcacggacgattactgataaacttggctaattcttcgcgtaccgcgctggattccgtctctttatagcggcgctccatattatgcagcacgccttcgaacggatgacgacgaatggaggtatcgccacgatcgttcatgtatttgaattcaatgttttctttgccagaaccgtacaacaccactttatgcacgttcgcgctcaggctgccccacggcgcttcgacgtcgaacttatagtgatctgccaggcttttcagcatctggaaataatagaagttgcggcgatcccagccacggatcgcaccaccagccaggctcagttccggattctggatcactcgatcaggatcgaaatattgctgtacgccaaggccgtcgcaggtcgggcaggcccccgccgggttgttaaagctaaacagtcgcggctccagttcacgcatactgtagccgcaaattgggcaggcgaagttggcggagaacagcagctcttccgctttcgggtcgtccatatccgccactaccgcggtaccaccggaaagctccagcgcggtttcaaaactctcggcaagacgttgggtaagatcgtcacgcaccttgaagcgatcaaccaccacttcaatggtatgtttcttttgcagttccagttttggcggatcggaaagatcgcagacttcgccatcaatacgagcacggatgtagccctggcttgccaggttctccagcgttttggtgtgttcgcctttgcgctctttaatgattggcgcgagtagcatcagacgcttgccttccggctggctcagcacgttatccaccatctggctgacggtttgcgccgccagcgggacgtcgtggtccggacagcgcggctcgccaacgcgggcgaataacaaacgcaaatagtcgtggatttcggtgattgtccccaccgtagaacgcgggttatgagacgtgcttttctgctcaatactgatggcaggagaaagcccctcaatatgatcgacgtccggcttttccatcagactcagaaactgccgcgcgtaggcggaaagggattcaacgtaacggcgctgcccttcggcatataaggtgtcgaaagcgaggctggatttgccagaaccgctaagcccggtcacgacaatgagcttgtcgcgggggataacgaggttgatgtttttgagattatgggtgcgggcgccccgaacttcgatcttatccattcacctttcccggattaaacgcttttttgcccggtggcatggtgctaccggcgatcacaaacggttaattatgacacaaattgacctgaatgaatatacagtattggaatgcattacccggagtgttgtgtaacaatgtctggccaggtttgtttcccggaaccgaggtcacaacatagtaaaagcgctattggtaatggtacaatcgcgcgtttacacttattcagaacgatttttttcaggagacacgaacatggccagcagaggcgtaaacaaggttattctcgttggtaatctgggtcaggacccggaagtacgctacatgccaaatggtggcgcagttgccaacattacgctggctacttccgaatcctggcgtgataaagcgaccggcgagatgaaagaacagactgaatggcaccgcgttgtgctgttcggcaaactggcagaagtggcgagcgaatatctgcgtaaaggttctcaggtttatatcgaaggtcagctgcgtacccgtaaatggaccgatcaatccggtcaggatcgctacaccacagaagtcgtggtgaacgttggcggcaccatgcagatgctgggtggtcgtcagggtggtggcgctccggcaggtggcaatatcggtggtggtcagccgcagggcggttggggtcagcctcagcagccgcagggtggcaatcagttcagcggcggcgcgcagtctcgcccgcagcagtccgctccggcagcgccgtctaacgagccgccgatggactttgatgatgacattccgttctgatttgtcattaaaacaataggttatattgttttaaggtggatgattaaagcatctgccagccataaaaaagaagcctccgttatggaggcttctacgtatcaggtcaaaatcattggccattgtggcggtgtctgattcatctcttctatcatcacgctctcgatgttgtgccagatagcggtgatgtccgccattgtgatgccaagcaaccccattgcgaaccaacaggcggaaacaacgcccagaccgctgctgatcaccgcaagcccgacataatcagaccgacgaaaacggatgttgagtgtgctggccagaaacatcattacggcactaagaagttgccagcgaagaagaaccacgccagtggtgagggtagccatcaaacaattcctctgaaaagagccgatgccctggacagcgcggcgttgttcacgggaggcgtggtacactctggctatcgcggggcttgcagaacacaaaaatgaaacactctgtttgtttcattaattttgtgaactatatcacaattgattgtttgttagccatattaggccgtgacttttattgctgtacagattatgtggtttttcagtggcattaagggcatatcttcccgccgcctctgcattcctgtaggaaattaattttgaatatcaatgaattattttcatccaggtgacgattagaaaggtatcaatttcaaatcaggcaaaagtgctatttataccgtaagatttatctaaagacgtcggtacccagggttttcaccttgcaatggccgggtataaacaggcaggaaattgatagcaatgagtcatcgtgcacgacaccaattactggcgttgccgggcattatctttttagttctctttcccatcattcttagcctatggattgccttcctttgggcaaaaagtgaagtgaataatcagctccgaacctttgctcaactggcactggataaatccgagctggtcattcgccaggcagatttagtgagcgatgcagctgaacgctatcaggggcaagtttgcactccagcccatcaaaagcgaatgttgaatattattcgtggctatctttatattaatgaattgatctatgcccgtgataaccattttttatgcagtagcctgatagcgcctgtaaacggctatacgattgcaccggccgattataagcgtgaacctaacgtttctatctattattaccgcgatacgccttttttctctggctataaaatgacctatatgcagcggggaaattatgtggcggttatcaaccctctcttctggagtgaagtgatgtctgatgacccgacattgcaatggggtgtgtatgatacggtgacgaaaacctttttcagcttaagcaaagaggccagcgcagcaacgttttctccgctgattcatttgaaggatttaaccgtacaaagaaatggctatttatatgcgacagtttatagcacaaaacgcccaattgcagccattgttgcgactagttatcaacgtcttataacccatttttataatcatcttatttttgcgttgcccgccggtattttggggagtcttgttctgctattactctggctacgtattcgacaaaactatttatctcccaaacgtaaattgcaacgcgccctcgaaaaacatcaactttgtctttattaccagccaataatcgatatcaaaacagaaaaatgtatcggcgctgaagcgttgttacgttggcctggtgagcaggggcaaataatgaatccggcagagtttattccgctggcagaaaaggaggggatgatagaacagataactgattatgttattgataatgtcttccgcgatctgggcgattacctggcaacacatgcagatcgctatgtttctattaacctgagcgcctccgattttcatacgagtcggttgatagcgcgaatcaatcagaaaacagagcaatacgcggtgcgtccgcagcaaattaaatttgaagtgactgagcatgcatttcttgatgttgacaaaatgacgccgattattctggctttccgccaggcaggttacgaagtggcaattgatgattttggtattggctactctaacttgcataaccttaaaagtttgaatgtcgatattttgaaaatcgacaaaagctttgttgaaacgctgaccacccacaaaaccagtcatttgattgcggaacacatcatcgagctggcgcacagcctggggttaaaaacgatcgctgaaggcgtcgaaactgaggagcaggttaactggctgcgcaaacgcggcgtgcgctattgccagggatggttctttgcgaaggcgatgccgccgcaggtgtttatgcaatggatggagcaattacccgcgcgggagttaacgcgcgggcaataaaattacaggcggtggcgataatcgctgggagtgcgatcaaactgccgacggaaaacgcgggagaaggtctgctggctgacataacccaggtccattgcgatatcaaaaatcggacgctcggtggtgcgcaactcaacggcggccagtaacaggcggcgttggcgaatgtaatcgccaagcgtctgatgcgtcaccgtgcggaacattcgttgcaagtaccacttactatagccacttttttttgcgactacatcaatgttaagcggctggtcaatatgctcgtcaatccatgcgataagatcctgaataattttctgatgggacataaatctgcctcttttcagtgttcagttcgttaattcatctgttggggagtataattcctcaagttaacttgaggtaaagcgatttatggaaaagaaattaccccgcattaaagcgctgctaacccccggcgaagtggcgaaacgcagcggtgtggcggtaagcgcgctgcatttctatgaaagtaaagggttgattaccagtatccgtaacagcggcaatcagcggcgatataaacgtgatgtgttgcgatatgttgcaattatcaaaattgctcagcgtattggcattccgctggcgaccattggtgaagcgtttggcgtgttgcccgaagggcatacgttaagtgcgaaagagtggaaacagcttagctcccaatggcgagaagagttggatcggcgcattcataccttagtggcgctgcgtgacgaactggacggatgtattggttgtggctgccttagccgcagtgattgcccgttgcgtaacccgggcgaccgcttaggagaagaaggtaccggcgcacgcttgctggaagatgaacaaaactaaagcgccacaagggcgctttagtttgttttccggtctttgtctttctctctatcccgctggtacacaggagggtttcccccgacgtcaacacacctcattcgagcacgtggtggaggttccggttggtgttgatgctttaattgtatgtcaccgacgtttcttcgccagtgtaaaagtatactttttaaccgcaatatttttgtcatctcagacgattttttatcgcaatcctgaacggtatacggctcgataacgctgcaatcttgcgcaccgacgataacgtttgcgcatcaattgcctggtttttcatcgtcaagacaataaaagagaaaaaagcagcaaacttcggttgaaaaagccgctatgatcgccggataatcgtttgctttttttaccacccgttttgtatgcgcggagctaaacgtttgcttttttgcgacgcagcaaattgtcgcaaacctggagcaggaagataacgtttcgctggcaggggattgtccgccacgcatcttgacgaaaattaaactctcaggggatgttttcttatgtctacgccaagtgcgcgtaccggcggtagtctcgacgcctggtttaaaattagtcaacgtggaagcactgtccgtcaggaagtggttgccgggttaacaacgtttctggcgatggtctacagcgtcatcgtcgttccaggtatgttgggtaaagcaggcttcccgcctgcggcagttttcgttgcaacctgtctggttgccggactcggttctatcgtgatgggtctgtgggctaatctgccgttggcgattggttgcgccatctccctgacagcgtttaccgcattcagcctggtgctggggcaacatattagcgtacctgtcgcgctgggtgccgtgttcctgatgggtgtgctgtttacggtaatttctgccacgggtatccgtagctggattttgcgcaacttgcctcacggtgtggcgcacggcacggggattggtatcggtctgttcctgctgctcattgccgctaacggtgtcggtctggtgattaaaaacccgcttgatggtctgcccgttgcgctgggtgatttcgcgaccttcccggtgattatgagtctggtaggtctggcggtgatcatcggcctggaaaaactgaaagtccctggtggcattctgctgaccattatcggtatcagtattgtcggtttgatcttcgatcctaacgtccatttctccggcgttttcgccatgcctagtttgagcgatgaaaacggcaatagtctgattggcagcctggacattatgggcgcgctgaatcctgtagtcctgccaagcgttctggcgctggtgatgacggcagtatttgatgccaccggaactatccgtgccgtcgccggccaggcgaacctgctggataaagatgggcagatcatcgacggtgggaaagcactgaccactgactccatgagcagcgttttctctggcctggtgggtgcggctccggcagcggtatacatcgagtctgcggcgggtacggcggcgggcggtaaaaccggtttgacggctatcaccgttggcgtgctgttcctcctgattctgttcctctctccgctctcttacctcgttccggggtatgcaacggctccggcgctgatgtacgttggcctgctgatgctgagcaacgtggcgaaaatcgactttgctgattttgttgatgcgatggcgggtctggttacggctgtattcatcgtgctgacctgtaacatcgtaacaggcatcatgatcggcttcgcgactctggtgattggtcgtctggtttccggcgaatggcgcaagttgaacatcggtacggtcgttatcgccgtggcgctggtgaccttctatgcgggtggctgggctatctaatctttcatcggattctgaaaacgggtggcaatggctgcccgtttttattttctccgcacattgtgtgagcttttgcgatattctgaaaaaaatgagaattcaggcataacgtctttctcagatcataaaaaacatcgcaaacagggaacgcatggaaatcttcttcaccatactgataatgaccctcgtggtcagcctgtccggggtggtcactcgtgtcatgccctttcagatcccgcttccgcttatgcaaatcgccatcggtgcgctactggcgtggccgacgtttggtttgcatgtggagtttgatcctgaactctttttagtcttgtttatcccgccgttgctgttcgctgatggctggaaaacgccgacccgtgaatttctcgaacatggtcgagagattttcggcctcgcgctggcgctggtggtggtcaccgtggtcggcattggcttccttatttactgggtggtgccgggcattccgctgatccctgcctttgcgctggcggcggtgctttctccgaccgatgctgtggcgctctccgggattgttggcgaagggcgcatcccgaaaaaaatcatgggcattttgcagggcgaagcgttgatgaatgacgcctccggtctggtgagcttgaagtttgccgtagcagtggcgatggggacgatgatcttcaccgtcggcggtgcgacggtcgaatttatgaaagtagccattggcggtattctcgccggttttgtggtgagctggctgtacggtcgcagcctgcgattcctcagccgctggggcggtgatgaacccgcgacgcagatcgtcctgctgttcctgctgccattcgcttcttatctgattgccgaacatattggcgtttccggcatcctcgctgcggttgccgccgggatgaccatcacccgctccggtgtgatgcgccgtgcgccgctggcaatgcgcctgcgtgcaaacagcacctgggcgatgctggaatttgtctttaacggcatggtgttcctgctgttaggtctgcagctgccgggtattctggagacgagcctgatggcagcagaaatcgaccctaacgtcgaaatctggatgctgtttaccaatattattctgatatatgcggcgctgatgctggtccgtttcggctggctgtggacgatgaaaaagttcagcaaccgcttcctgaagaagaagccgatggagtttggtagctggaccacacgagaaatcctgatcgcgtctttcgccggggtgcgtggggcgatcactctggccggtgtgctctctatcccgctgctcttgccggatggtaacgtcttcccggcgcgctatgagctggtgttcctggcggctggcgtcattctcttcagcctgtttgtcggcgtggtgatgttgcctattctgctacaacacattgaagtcgcggatcatagccaacaattgaaagaggaacgtattgcgcgagcggcaacggcagaagtggcgattgtggcgatccagaaaatggaggagcgtctggcggcggataccgaagagaatatcgataaccagctgcttacggaggtcagttctcgcgtcattggtaacctgcgtcgtcgcgccgatggacgtaacgacgttgaaagttccgtgcaggaagagaaccttgagcgtcgcttccgtctggcggcattgcgttctgaacgtgctgaactttaccacctgcgcgccacacgggagatcagcaacgaaacgctgcaaaaattactgcacgatctcgatttgcttgaagcgttgctaattgaggaaaatcagtaagccgaaagcgacgtaaccaggcccgaggtaatctgaaaaaggtgcaatcttttgcacctttaacaggttagctcgggctaacattcatgattctaaaacaaataaattatctctcttttaaagtcaattcattggctgttcttcgacttaacctcaatctgcatcttgcataatatctgcagtaatcttcatagcgactgcatgaagattatcctcagtttgactcatgccagtatgagtggcacaatcttcttcaaagaatttctgtagtgttaccaggatatcactattaatggagatattttcctcaccacggagaatggtaatacccattccctggacgctagcctcatcgaaattaacacgatagagacggatattaaacatccaggcttttgttaaaacagaacagttgaaatggcaattgcttaaattggcattattaaaattaacattagccatattagagtcggtacatataaccatttcgaggaacgtatttgttaaccgcgtaaaaaagagtttgctatcaattaagtttatattctggagggttgctttattcaggttgacacgagacagatcagcatgttcaaagttaattaaatcaagtttagagaagctaaggtcggctctaaataaattaatatatggcgctattactttataaagatttacctcagccatgtatgccatataaaaattactataatcaaggaaggtatttttaatattggctctattcattgttgcattgtagaattgaacatgcatagcggaacaactatttagagttccgtcagtcatttttatctgagcgaaattactgtcatcgagaatacaattatcaaaaagtattttttccattatggcgaaattaaaattcgttttatacatattacagtcctgaaaaatagcgttttgtagtctgcaacctgcaaaattgctattggataaatcttcatctttaatcacgatacctttcaggctaaggtgactaaaatcgtaaccaccatttactgtctgtgggatttcgatagtattattatggacggtgacattatttataaaatataccaccttaatactcacttccttatctttattaaggtaaactcttctcgtaattctatcgtcacatttattatttgcatgactagctatatctataaaatatttatgtattttcctgtccgtttctttcgtgatttttccacttggtaaactatcataaattcttttcattttctgaatcaagcctatcactttttcatgatcatccattttgaaaagagagagggctttattgtcaattaacgtgtttttatgatgtttgctgtaattatcactttttgttttctttgtatgacttggacttgtgacagagtggttatcgttaatcaggcaaagagggaaaaacatattatttaaaccattatagcgcataaaatatccttataattaacaagaaagaaaaggcatattctctgcattatcattttctacgactgtcaaaaatcgctcattttttaatgagtttatttgtttaatattatgggaaaaggtgatgcatttgggagaggaagagtattccccggtcagacgaccggggaaggggagagattaatgcgcgcggccttgctcaacgccaaagccggtctgggagcggataaactgcgcgcggaacagttcacgctcacgcgcgccttccgcactgttatcggttgcgctgaagaaccagatgccgaggaatgccacggtgatagagaacagcgccgggtattcatacgggaagatggctttttcgtgaccaaggatctgtacccaaatcgtcgggccgaggatcatcagtactactgcggtaatcagccccagccagccacccatcatcgcgccacgcgtggtcagtttgctccagtacatagaaagcagaatgatcgggaagttacagctcgccgcgatggcaaacgccagccccaccataaaggcgatgttctgattctcaaacagcacgccgaggataatcgcaatcacgccgaggatcagtacggtgattttacttacccgcagctcttcacgttcggtcgcgccttttttgaagacgttagcgtacaagtcatggctaaccgcggatgcgcccgccagcgtcagacccgcaaccaccgcgaggatagtggcgaaagcaaccgcactaataaaaccgaggaacaggttgccgcccactgcattcgccaggtgaacggccgccatgttgttaccaccaatcagatggcccgccgcgtctttatattccggattcgcaccaaccagcatgatcgcgccgaagccgataataaaggtcagaatatagaagtagcccataaacccggtggcgtagaacacgctcttacgtgcttcgcgggcatcgctgactgtaaagaagcgcatcagaatgtgcggcaagcccgccgtaccaaacatcagtcccagacccagagagagcgcggagatcggatctttcaccagcccgcccggcttcatgatgtcgacacctttcgggtgtaccgccatcgcttcactgaacagattgttgaagctaaagccgacgtgtttcatcaccataaaggccataaagctggcaccgaacagcaacagcacggctttgataatttgcacccaggtggtcgccagcatgccgccgaacaggacgtacatcatcatcagcacgccgaccagcaccaccgcaatgtgatagttaaggccaaacagcagctcgatcagtttacctgcgcccaccatctgggcgataaggtaaagcgccaccaccaccagagaaccacaggcgctaagaatacgaatcggcccttgtttcagacggtaagaggccacatcggcaaaggtgtagcgccccaggttacgcagacgttcggcaatcaggaacaaaatgatcggccagcccaccaggaagcccaggctgtaaattaagccgtcatagccggaggtaaacaccagcgcggagatccccaagaaactggcggcggacatatagtccccggcaatcgccagcccgttctggaagccagtgatattgccgcctgcggtgtagtagtcgctacgagaacgtacgcgtttacttgcccagtaggtaatgccgagcgtaaacacgacgaaaatcaggaacataataatcgcctgccagttcgttggctggcgctctacggccccgctaatagcatccgcggcgttagctgcgaaagggagtgtggcggcaagcgccgtcagaactcttttcatgatgcttgtacctcatgcagttatttcaacttgcttgtacctcatgcaggacttcattattaagacggtcgaattcgccgttcgcccgccagatgtagataccggtgagaacaaaggagatcacaatcactccaacaccaattggaataccgcgtgtgacgctggtgttcggattcagcggcgtgcccagccagccgggcgcgaaggcgatcagtaaaataaagccgatataaactgccagcataataatgctcaggatggtggcaaaccgttgccgtttttcgactaactccctgaaatgcgcattgtcttctatccgctgataaatagtgccattcatcacagattctccagaggtaatgtagggattgttttaattcccgctcccttatgggagaaggttaacgctcgggtaacccttgccgaatgtaggccggataaggcgtttacgccgcatccggcaatcaatgcctgatgcgacgctgtcgcgtcttatcaggcctacaaaccgttaccgactcgcatcgggcaattgtgggttagcttggcatcgcgatagcctgcttctcttcaagcagcttctcgactacgccaggatcggcaagcgtgctggtatcgcccaggttgctggtatcgcccgccgcaattttgcgcagaatacggcgcataattttgccggagcgggttttaggcagggagtcggtccagtgcagcacgtctggcgtcgccagcgggccaatctctttacgcacccagttgcggacttctgcgtacagttctggactcggttcctccccgtgattaagcgtgacgtaggcgtagatcgcctgacctttaatattgtgcggaatacctactacggcggcttcggcaatcttcggatgcgccaccagcgcgctctcaatctctgccgtccccagacggtgaccggagacgttcagcacgtcgtccacacgcccggttatccagtaatagccatcttcatcgcgacgcgcgccgtcgccgctgaaatacatatttttgaaggtggagaagtaggtctgttcaaaacgttcgtgatcgccaaacagcgtacgcgcctgacccggccaggagtcggtgattaccaggctaccttcggtggccccctccagcgggttaccttcgttatcgaccagcgccggttgcacgccgaagaacggacgtgttgcgctaccggctttcagctcggtagcgccaggcagcggggtgatcatgaaaccgccggtttcggtctgccaccaggtatcgaccaccggacatttctcgttgccgatttttttccagtaccactcccacgcttccgggttaattggctcgcccacggaaccgagaatgcgcaggctgctacggtcggtgccttcgatcgctttatcgccttccgccatcagcgcgcggatcgccgtgggtgcggtatagagaatattgacctgatgcttgtccaccacctgcgccatacgggcaggcgtcggccagttgggtacgccttcaaacatcagcgtggtcgcaccgcaggccagcgggccgtacagcaagtaactgtgtccggtcacccagcccacatcggcggtgcaccagtagatatcacccggatgataatcaaagacatatttaaaggtcagcgccgcgtacaccagataaccgccggtagtatgcagcacaccttttggcttaccggtagaaccggaggtgtagagaataaacagcggatcttcggcgttcatctcttccgcctggtgctgatcgctcgcttgctcaaccaggtcgtgccaccacaggtcgcgcccttcctgccagtcaattttcccgccagtacgcttcagtaccaccacatgctctacgctggtgacgttcgggtttttcagcgcgtcatcaacgtttttcttcagcggaatactgcgcccggcacgcacaccttcgtcggaagtgatcaccagtcgactgttggaatcaataatgcgcccggcaacggcttccgggctgaagccgccgaaaatcacgctatgcaccgcgccaatgcgggcgcaggccagcatcgcaaccgcggcttccggcaccatcggcatataaatcgccaccacatcaccttttttaatgcccagctcgagcagggtattggcgaagcggcagacgtcgcggtgcagctctttatagctgatatgtttgctctggctggcgtcgtcgccttcccagatgatggcggtacgatcgccgttttcttgcagatggcggtcaaggcagtttgccgccagattcagcgtgccgtcctcgtaccatttaatggacacattaccgggggcaaaggaggtgtttttcaccttctggtaaggtttgatccagtcaagaatttttccctgttcgccccagaaggtatcaggtacgttaatagattgttgatacatcgcctcgtactgctgagggtttatcaggcaacggtctgcgatgttggcaggaatggtgtgtttgtgaatttggctcatgcttttgttctccttgtaggatgttaataatatgtggcataagcgttaaatgtaggggtattggcagttttgtttagtatttgggcgacagatcacgcaaaagtagaattgtgcaaataaacggcagggtaatttttgaaggtcagcaacaaaagttgattaattctttgaggaacatgcagttatgcatgctgttgaaaaagaggaagatactgactaactctaaagtggtattttacatgcacttacaattgattaaagacaacattcacagtgtggttatttgttacacataggggcgagcaatgtcatgacagtgtaggtgcggttactgtcgtgaaaaacaataaaaaccgccattgcaacaatggcgcaattcggatgaagcccctatgacaaggataaaaataaacgcacgccgtatcttcagcttattgattccttttttctttttcacttctgttcacgctgaacaaacggctgctcccgcaaaacctgtaactgtggaagcgaagaatgaaacctttgccccgcagcatcccgatcaatatctctcctggaaagccaccagcgaacagagtgagcgtgttgacgccctggcggaagatccacggctggtgatcctgtgggcggggtatcccttcagccgcgattacaacaagccgcgtggacatgcttttgctgtgaccgatgtgcgtgaaaccctgcgtaccggtgcgccgaaaaacgctgaagatggtccgctaccgatggcatgctggagttgtaaaagcccggatgtggcgcgtctgatccagaaagacggcgaagatggctacttccacggtaaatgggcgcgcggcggtccggaaatcgtcaacaacttaggttgtgccgattgccataacaccgcctctccagagttcgccaaaggcaaaccgaagttaaccctttcccgtccgtatgcggctcgcgcgatggaagccattggtaaaccttttgagaaagccggacgtttcgaccagcaaagcatggtttgcggtcagtgccatgtggagtattacttcgacggcaaaaacaaagcggttaaattcccgtgggatgacggcatgaaagtcgaaaatatggagcagtattacgacaaaattgccttctctgactggactaactccctgagcaaaacgccaatgctgaaagcgcagcacccggaatatgaaacctggacagcgggcattcacggtaaaaacaacgtgacctgtatcgactgccatatgccaaaagtgcagaacgccgaaggcaaactctacaccgaccataaaattggtaatccgtttgataacttcgcccagacttgtgcgaactgccatacccaggacaaagctgccttgcaaaaagtggtcgcggaacgtaagcagagcattaacgacctgaaaatcaaggttgaagatcaactggttcacgctcacttcgaagcgaaagcagcgctggatgcaggcgcgacggaagctgaaatgaagccaattcaggacgatatccgtcatgcccagtggcgctgggatctggcgatcgcttcccacggcattcatatgcacgcaccggaagaaggtttacggatgctcggtacggcgatggataaagcggcggatgcacgcaccaaactggcgcgcctgctggcgaccaaaggcatcacccatgaaatccagatcccggatatcagtaccaaagagaaagcccagcaggccattggcctgaacatggaacaaatcaaggccgagaagcaggacttcatcaaaacggtgatcccgcagtgggaagaacaggcacgtaaaaacggtctgttaagccaataaccccgttccgcctcgcaaggggcggaaaacacaatggagtgaatatgagcgtattacgtagcttattaactgccggggtgctggcgagcggcctgttgtggagcctgaacggaattaccgctacccctgcggcgcaggcatctgatgatcgctacgaagttacccagcagcgtaacccggatgccgcctgtctggactgtcataaaccagataccgaaggtatgcatggaaaacatgcttccgttatcaacccgaataacaaactgccggtcacctgcaccaactgtcacggccagccaagtccgcaacaccgcgaaggggtgaaagatgtgatgcgctttaacgagccgatgtacaaggttggagagcagaacagcgtctgtatgtcctgtcatctgccggaacagttgcaaaaagcgttctggccgcacgatgtccacgtaaccaaagtggcgtgcgccagctgccattccctgcatccacagcaagatacgatgcagacgttaagtgacaaaggacggattaagatttgcgtcgattaccacagcgatcagcgcaccaatccgaactttaacccggcgtctgttccgttgcttaaggagcagccatgacctggtctcgtcgccagtttctcaccggcgtcggcgtgctggcagccgtcagcggcaccgcagggcgcgtggtggcgaaaacgttgaatatcaatggggtgcgttacggcatggtgcatgacgagagcttatgcatcggctgtaccgcctgtatggatgcttgtcgggaagtgaacaaggtgccggaaggcgtcagccgcctgacgattattcgtagcgagccgcagggcgaatttcctgatgtgaaatatcgcttcttccgtaagtcttgccagcactgcgatcatgcgccgtgcgttgacgtctgcccgaccggtgcgtcttttcgcgatgctgccagtgggattgtcgatgttaatccggatctctgcgtcggttgtcagtactgcatcgccgcctgtccgtaccgcgtgcgctttatccatccggtcacgaagacggcggacaaatgcgatttctgccgtaagaccaatttgcaggccggtaagttgcccgcgtgcgttgaagcttgcccgaccaaggcgctgacgtttggcaatctggacgatcccaacagtgagattagccaactgctgcgccagaagcccacttaccgctacaagctggcgctgggaaccaaaccgaagctgtaccgcgtaccgtttaaatacggggaggtgagccaatgacgcagacttccgcatttcattttgaaagcctggtgtgggactggccgattgccatctacctgtttttgattggtatttctgctggtctggtgacgctggccgtgctgttacgtcgcttctacccgcaggcgggcggtgcagacagtacgttgctgcgcaccacgctgattgtcgggccgggcgcggtgatcctcggtctgttgatcctcgtcttccacctgacaagaccgtggaccttctggaagctgatgttccactacagttttaccagcgtgatgagcatgggggtgatgctgtttcagctctacatggtggtgctggtgctgtggctggcgaaaatctttgaacatgatttgcttgccctgcaacaacgctggttgccgaagctggggatcgtgcaaaaggttctgagcctgctgacgcccgttcatcgcggactggaaacattgatgctggtgctggcggtgttgttgggggcttataccggctttctgctgagcgcgctgaaaagctatccgttcctcaataacccgatcctgccggtgctgttcctcttctccggcatcagctccggtgcggcggtggcgctgatcgccatggcgatacgccaacgcagtaacccgcattccacggaagcgcagtttgtacaccgtatggaaatccctgtggtatggggtgaaatcttcctgctggtggcgttttttgtcggtctggcgctgggcgatgacggtaaagttcgtgcgctggtggcggcattaggtggcggtttctggacgtggtggttctggcttggtgtcgccgggctggggctgattgtgccaatgctgctcaaaccgtgggtcaatcgcagttccggcattcctgccgtgctggcggcgtgtggggccagtctggtcggcgtgttgatgctgcgctttttcattctctacgccggacagttgacggtggcgtaagccagaaaagaggtggtttctggacgtattccttcctgaagtcggttttctggcgttgttgttaagtctcggggtcaacgtgttgaccccgttgacggccttcgcgggagtgcggttgcgctggcctgccatgatgcgactcacttgcatcggcattctggcgcagttcgcgctcctgctgctcgcctttggcgtactgacgtattgttttctcatcagcgatttcagcgtcatttatgtcgcgcaacatagctatagcctgctgagctgggaactcaagctggcagcggtgtggggcggccatgaaggtagcctgctgctttgggtgctgctgctttccgcctggagcgcgctgtttgcctggcattatcggcagcaaaccgatccgctatttccgctgacgttagccgttttatctctcatgctcgccgcactgctactgtttgtggtgctgtggtccgatcccttcgtgcggatatttccaccagcaatcgaaggccgcgatctcaatccgatgctgcaacatcccggtcttatctttcatccaccgctgctttaccttggctatggcggtttgatggtagcggcgagcgtggcgctggcgagtctactgcgcggcgagtttgatggtgcctgcgcccgaatttgctggcgctgggcgttacctggctggagtgcattaacggcggggatcatcctcggttcctggtgggcctactgcgaactcggctggggcggctggtggttctgggatccggtggaaaacgcctctttattaccctggctttctgccactgcgctgctgcacagtttgtccctgacacgccagcgggggattttttgccactggagcctgttgctggcgatagttactctgatgctgagcctgctgggcaccttaattgtccgttctggcattctggttagcgttcatgcgttcgcgctggataacgtccgcgccgtgccgttgttcagcctgtttgcactgattagccttgcgtctctggctctgtatggctggcgagcgcgggacggtggcccggcggtgcattttagcgggttaagccgggaaatgttaatcctcgctacgctgttgctgttttgcgcagtgctactgatcgtgctggtgggaacgctttatccgatgatttacggcctgctgggctggggacgcctctccgttggcgcgccgtattttaaccgcgcgacgttaccgtttggtctgttgatgctggtggtgattgtgctggcgacgtttgtctctggcaaacgcgtgcagcttccggcgctggtagctcatgcgggcgtgctgttatttgccgctggggtcgtggtctccagcgtcagccgtcaggagatcagcctgaatttacagccgggtcagcaggtgacgctggcaggatacaccttccgttttgagtgcctcgatctacaagccaaaggcaattacaccagcgaaaaagcgatagtggcactgtttgaccatcagcaacgcattggtgaactgacgccggagcggcgtttttatgaagcacgccgtcaacaaatgatggaaccgagtattcgctggaacggcatccatgactggtatgcggtcatgggggagaaaactgggccggatcgttacgcttttcgtttgtatgtacaaagcggtgtgcgctggatctgggggggaggattgttgatgattgcgggcgcattgttaagcggatggcgggggaagaagcgcgatgaataaagggcttctcacgctactgctgttatttacctgttttgcgcacgctcaggtcgtagacacctggcaattcgccaatccgcaacaacagcaacaggcgttaaatattgccagccagttacgttgtccgcagtgccagaatcaaaacttactggaatccaacgcgccggtggctgtcagtatgcgccatcaggtttacagcatggtggcggaggggaagaacgaagtcgaaatcattggctggatgaccgaacgctacggagattttgttcgctataacccaccgttaacgggtcagacgctggtgttatgggcgctgccagtggtgttgttactgctgatggcactgatcctctggcgagtgagggcgaagcgatgaaacagcccaaaataccggtgaaaatgctgacaacactcacgatattgatggtatttctctgtgtcggcagttatctgttaagcccaaaatggcaggcggtacgtgcggagtatcagcgtcagcgcgatccgctacatcagtttgccagccagcaaaccccggaagcgcagcttcaggcattgcaggataaaatccgcgctaatccacaaaacagcgaacagtgggcgttactgggcgagtactatctgtggcaaaacgattacagcaatagcttgctggcgtaccgtcaggcgttgcaactacgtggtgagaacgctgaactgtatgcggcgctggcgacggtgctttattaccaggccagccagcatatgaccgcccagactcgcgcaatgatcgacaaggccctcgcgctggacagtaatgaaatcaccgccctgatgctgctggcttccgatgcgtttatgcaggcgaactacgcgcaagccatcgaactatggcaaaaagtgatggatctcaacagtccgcgagttaaccgaacacagctggttgagagcattaatatggcgaaattgttgcagcggagattggattaatcatctggtgatgaagattatgtcattgagctgcataaaaaataatcgaatgaacatatgccaaaaataatcactaatcagtattattgcagattaaacaaataaaaatctttccataacaaatggttattcattaatcctgccataaactcgcgttattatgcattaatgcagcgaaaagctctgttgttaaagggttgcgcaacataccgcgcaaatgatactgatcataagcgttaaaaaaatctacaaaccaacgcaacacaattcatgccccggcagtatgtcacgttctcgcgtttctgaacggggaacggcgctccattgaggaagtcattcatatgaaaaatataaaattcagcctggcctggcagattctgtttgctatggtgctgggcattctcctgggaagctacctgcactaccatagcgacagccgcgactggctggtcgtcaatttgctctctccggcgggtgatatcttcatccatctgattaaaatgattgttgtgccgattgtgatctccacgctggtggtgggtatcgcgggtgttggtgatgccaaacagctcgggcgtattggcgcgaaaaccattatctacttcgaggtgatcaccaccgtcgccatcattttggggatcactctggcgaacgtcttccagcccggtgccggggtggatatgagccagttggcgaccgtcgatatcagcaaatatcagagcactacggaagcggtacaaagcagttcccacggcattatgggcacgattttgagcctggtgccgacgaacattgtggcgagcatggcgaaaggcgaaatgctgccgatcatctttttcagcgtgctgtttggtctggggctttcttccctgcccgcgacgcatcgtgaaccgctggtgaccgtgttccgctccatctctgaaaccatgtttaaagtgactcacatggtgatgcgttatgcaccggtgggtgtgtttgcgctgattgcggtgacggtggctaactttggtttcagctctctgtggccactggcgaaactggtgctgctggtgcatttcgccattctgttcttcgcgctggtagtgctgggaattgtggcgcgcctgtgcgggttaagcgtctggatcctgattcgtattctgaaagatgagctgattctggcgtactccactgccagctctgaaagcgtgctgccgcgaattattgagaagatggaagcctacggagcaccggtgagcatcaccagtttcgtggtgccgaccggttactcttttaaccttgatggtagcacgctgtatcaaagtattgccgctatcttcatcgcgcagttgtatggcattgacctgtccatctggcaggaaatcattctggtgctgacgctgatggtgaccagcaaagggattgctggcgtgcctggcgtgagctttgtggtgttgctggcaacgctgggtagcgtaggtattccgctggaaggtctggcgtttattgctggtgttgaccgtatcctcgacatggcgcgtactgcgctgaacgtggtgggtaatgcgctggcggtgctggtgattgccaagtgggaacacaaatttgaccgtaagaaagcgctggcttatgagcgtgaagtgctgggcaaatttgataaaactgcggatcaataattgaagattgccggggatatccacccggcaatgtgtgaatgcctgatgcgacgcttgccgcgtcttatcaggcctacgccagacagcgcaatagcctgatttagcgtgattttgtaggtcggataaggcgtttatgccgcatccgacatcaacgcctgatgcgacgcttaacgcgtcttatcaggcctacgccagacagcgcaatagcctgatttagcgtgattttgtaggtcggataaggcgtttacgccgcatccgacatcaacgcctgatgcgacgcttgccgcgtcttatcaggcctacgccagacagcgcaatagcctgatttagcgtgattttgtaggtcggataaggcgtttatgccgcatccgacatcaacgcctgatgcgacgcttaacgcgtcttatcaggcctacgccagacagcgcaatagcctgatttagcgtgattttgtaggtcggataaggcgtttacgccgcatccgacatcaatgcctgatgcgacgcttgccgcgtcttatcaggcctatcttaaccgttggttaatttttcaaactcttcacacccggtatcaaacccttccatacagctcaggttcaaccagtgcagcgccttttgcttgttcttctcgataaaaccttcttcaccgtttaagaacatcattcccgcccagtactcggaataaccggttcgggaaattgcagagctgcgtttgaaataccaggttgccttgtcatcgtcggccttaatgcccacgccgttggcgtaaatcaaaccaagcagcatttgggcatcgacggcagagtcgttctccagatcttcgctggcgttttctaacaggctaattgcctttggataatccggtttacccgcttgagtatttaccagaatatgcgccagcgttacttcaccttctttactgcccgcttgcgccgctttctctgcaagaacttttgcttgtggatagtccagactgaccggattggtgattttgatctgcgccagcagcgcgcaggcatcagcatcaccgctgtcggcggctttctgtgcccaatattcggctttgctcaaatcgccggagctaaaccagctgtcggcaagaaaatattgtgcgcgtcggtccccggcctctgctgcctttaaatactggctgccaggctcggagtcgttggcgtgggcaaagaatgtcaaaaacaacatcaatgcgataatttttttcattttgataatacgattgggtagggagtaaccagtataaagagttcgaatggataaaaaaacagcctccgaaaggaggctgtagaaaggacggtattacgccagtgccgcttcgcgcaggcgagttttcaacttgttgtactcgtcaatcacgtactgctcggcggcgcgctgatcggcgatcggctcgacgcgaacggcgcagtatttgtactccggcgttttcgtaatcgggcttaagttttcggtaaccagctcgttacaggcaccaatccaccactggtaggtcatgtaaatcgcccctttgttcggacgatcgctgacctgcgcacgggtgataattttgcctttacggctgtgcacccaaaccaatgcctcatcttcaatacccagacgtttggcgtcttcggtattgatttgtgcgtagccaggttcatcagccagcgccgccagtgccgcacagttaccggtcatgctacggcaagagtagtgaccaacttcacgcaccgtactcagtaccatcgggtactcgtcggtgagtttgtcgattggcgctacccagtcgcaggtgaagaactgcgccagaccgttcggggtatcaaacttctctttaaacagataagaagtcccctgatcggcatcactagtatcgcggcaaggccactgaatgaagcccagttcgcccattttctcgtaagtcgcaccgtagaaatccgggcacagatgacgcaactcatcccagatctcctgggtgttgttgtagtgcatcggataacccatacgggtggcgatttcactgatgatttgccagtccgttttcagatcccatttcggttcaaccgccttgaagaaacgctggaagccacggtcagccgcagtaaacacgccttcatgctcgccccagctcgtactcggtaaaataacatccgccgcgctcgcggttttggtcataaagatgtcctgaacgataaccagttccagatcttcaaaggctttacgtactgcgctcagctccgcgtcagtttgtagcggatcttcgcccataatgtacgcggcacgcacttcgccatgcgctgcgcggtgcggcagctcgctgatgcgatagccggtatgcgctggcaggctttccacgccccaggctttggcgaatttctcgcggttagccggatctttcacgtactggtatcccggatacgtatccggcagcgcgcccatatcgcaggcaccctgaacgttgttctgaccacgaaccgggttaacacccgcatgcggcttaccgaggttaccggtcagcatcgcgaggctggtcagagaacgcacggtttccacgccctggtagaactgggttacacccatgccccacaggatggcggcgcttttcgcctgggcatacatccgtgccgcctgacgaatctcactggcgctgacgccggtgatatcttcaacgctctccggcgtgtagccttcaacgattttacgatactcttcaaagccttctgtacgactagcgacgaacgctttgtcgtacagattttcttcaataatgacatggcccatcgcattcaacagcgcgatgttgctgccgtttttcagtgcaatgtgcatgtcagcaatgcgcgcggtttcaattttgcgcggatcgcagacgataattttcgccccgttacgtttagcgttaattacgtgattcgccacgattgggtgggaatccgccgggttgtacccgaaaacgaacactaaatcggtattatcaatttcgttaatagcattgctcattgcgccattaccgacgctttggtgcagacctgcaacgcttgggccgtgtcagacacgagcgcagcagtcaacgttattggtaccaataacggcgcgcgcaaatttttgcattacatagttggtttcgttacccgtaccacggctggagccggtcgtctggatggcatccggaccgtacttctctttgatggcgctcaggcgctcggcaacgtaattcagtgcctcatcccaggaaacaggttcgagtttgccgccacgctggcgacggatcatgggggttttcaggcgcggggtcaggatctgggtatcgttaatgaagtcccagccataataacccttcagacacagggtaccctggttggttttcccctgcgctgcctccgcccggacgattttgccgttatcgacgaccaggttgattttgcaaccacttgcgcaataggggcaaaccgtgacgacttttttcatcggtctcgctccagttaatcaaatcacgcatacgcgctctcgactacagtatgcatcttttatgccacattttatgtggggtcattccctgatattacgggcactatttattcaaaactctgacgaaaaacaggctgtcgtcagttttgacgtgacgaaacgaaataccgcgtgacagccatcacgcggcagacattttattttttctcgacgacgggacctgcctgatacccgccgcccaggcttttcatcaactgaatgctttggatcacccggcggctgtccagcatcagtaaactcatctcttcggcaagcactggcaaccgggcttcggtggcctgtaagcggctggttaagccgcgctgataggcggcctcggcagcgcgctgggtaaagcgcgtggcttccacgcgttcagcctgcatttctcgctcgtcgttgagcgtttgcagacgcgtgccgttgacggcaacgtcacgcaccgcgttcagtacactctggttgtaacgttcaatcatcatgttgctggcggcgcgcgtgccttcgagattggcattcaaccgtccaccgtcaaacagcggcaatttcagacccgggatgaagttgaactggcgactggtttttttgaataaggtatgcagatggatggagtccagaccgaaaaacgctttgatatcaaagctcggatagaacaacgcccgcgcggaatccacctgatctaaactcgcctgaacataccagcgcatggcttgcagatccgggcgtctggcgagcaactcataagagagtgtcgccggaatgccggtctggacttgcggtaatgccaccggtctgatctccggcatatcgctggctcccgcgccaatcaatgcacgcagagattctcgcgtttcggtgatttgccctttgacggcaacaatttgtttatcgaccgccagaatctgtgcccgcgcgccgtggaaaggcacttgcgcttccagaccgtgcgccactttactctggtgcgctttcaccgcgtaatcaatcacatcgtgagtttgttctaacagatcgagcatctgatagctggcctgcatactgtaataaagctgcgctacgcccgtggccaggcttagctctactgctgcggtttctgccagcgcggcattatgcgcgccaatggcggcggcaaccgcactgcgatgcacaccccacaaatcaagatccagtccggcaaacaaacctactgtggcttccgtatagtacggcccgtccatacccagtgctggcgcatccatactataagggcttaaaaagccgttcgcgctgacacgttggcggttgagcatccctaacgctgcgacctgtaattgactaccggcatctaacaaatcggcctgggactgcgctttttcttcccgcagtttcgcttcggcgagggtgtgactaccacttagcgtccgttggatcagcgcatccagctgcgggtcattgagttgtttccaccactgcgcctgcggccagccggagctggcaagatgaatatcgtcggccagtttgatttgttccggtttgagctgttgatgaggtgcagaatccttacgtaccagggcacagccggaaatcagcgtcgtgctgccgagaatgctgcacaacagcagacgactaagttgacgattgatcattgcgtggctccttgtgcctgttccgtggcgggcgttaatgccggggctgtccagtctggcaagcgggcgaaaagctggcagacgtgttgctcctgttttaataaggtgggcaggatggcctgagaggcgggtgtctcttcaagcgttatttgaggagaacggctgagtgcggttgccagaccggcagcgtatttctccagggcgtcggcaaactgacctgctctgtccggctgtagtgcgttatccagcgcctgcgcgctgttccaggtggcatcccaggcgtgaagaagatcgcggccctgacgaataaccgtttggctacgttcaatcagtaatgcgcgttcttcgctgtccagttgacgctccagcgccacgcgttggcacatctcttcacaggcattaaacgccgcatgcagaccgatacgaatttgcagataagtgcgcagagccgtgacttcctgctggcgtgggatccgcattactttacttaacatacccagcgtgccagccagtttttgcggcagtgtgcgcgcttcactttcaggccagacaaaggtgtaaatcaccgcggacaccacggtaccaatgatgatacccagggcgcgatcgcgaatttccaccaggtcgtacactgggccaaaaacgttttcgagcgtggcgagcgcgaaggtgaccaccatctgtgtgccgatataagaagagcgttcagagctggtggcaatccatgcgcccaacaggaaaatcggtgccagcacaaacagcaattcgacaatattgtccagccagggcatgaccagtagcgtgaataacagcgccagaatcgcgccgcaaaaggccccgccaaaacgcagcaccatcttctggtagctgctaccgacatttgggttagcgacgatcacgcatgtcagcatacaggtgtgaatgccttcccagtccacgccgctgtaaaaggtgtaacagatcaaacaggcgagcagcgtttttaccgcgtagcgcatatagtctggattggtaaaagcatcggcggccatacttggcggtttggctgcgggcgttggcggcgtattcgggtccatctgacccagttgtaacaacgtctggcagatattctccaggttacattcccgtgccgccatcgcttcactttcactgatccgccagtcgctttgccagcactgaccttcagcaacggcatgctgcagcttgttgatttcactagctaatttttgtcggaattcaataattgcctgagaatcagcaaaagaggtgggatcgtagcgattcagcgtgctgtaaatgtaggttaccgttgccacgcagctttgccaccatgcgttttgagttcgccagttggcatcgtccgcgaggcaaaagacattgagtttttgtagcgccagcgcctctctttcaatccgcgtttcgggtagcggtgcgaggctgtctgtcaggtgactaatggcatcatcaagccgatcattaagcgcctgatgcatttggctaatggcacgactgggaaaccacagcacgccgattaacgtcatcagcaaggttggatagaggccaacaacgatacaccacagcgttaagcgcacgaccacttccggatagtcgagcatggcggggaaggtttgcccgtaaatagcgacaatggcgacggcgaaaaagaccagccccaagcgatgggtgcgcatcaaaaacatgcagcccatcaggatcggtccggcgatgatcaatcggatcaacggttcgccgtaactccatttgtagatcaaaaacaggctgccgatctccagcaccgtggcaaccacaaacaagatcgcgacaaatttggtgtaaaacgcgttgctctgaataccgtaaaacagcactgccaggcttaacgccacaaaagggatctcaaaggtcatgctgatcagaatcaccagcaggcagcctacccagagttgcacggtctgcggcacgcgacctggtcgccgctcgcttaactcttcatgaaagaacgccagcagcctgaccaccggtaatggcagggagttgagcgcgctcattattgcggctcaagattagcgactgcgctagcgccgatgcggaacatttccgggtcaggtttatcgaccatgattttgaccggaaaacgctgggcaacgcggacccagttaatagaacgagacactttcggcaggccgcccagcaccaggccgccgtcatccggtagcacgccgtagccaatgctatccactttaccctcgaaggttttgccgctgtcactcatcaggcgaatcgttgcgggtgtaccactgcgaatatttttcagatcggtttcgcggaagttggcgatcacataccagtgacgagtgtcgattagggtaaaaatagggcgcatggcagaagcaaattgcccgacggaggttttgagggaaatgacccggccatcaaacggcgcgcgaacggtcgccatttccagatgcagtttggtcagggcaatatccgcttcgaccgccgcacgctgggcaactaatgcatccacgccgctgacggcgctggcggcactctgcgcctgtaacaatacggcattaagatccgcttctgcggcgcgctgcgccgttcttgcacggtcaacatcttccgcactgacaaaaccttctttcagtaatggctcggtgcggcgtaatgtatctgtggcctgtttcgcggcggcacgggctttttctatcgtggcattaacgctgtcggcaccaaactgttgcgcgtcaacgctacgctgggtgagcataatttgcttatccagcgccgcgagggaggcttcagctttcgccagattggcttcgtacgggcgcgggtcgatgcggaacagcaaatcgccctgtttgactgcctggttgtcggtgaccgccagttctacaatgcggccgctgacttccggtaccacatcaatggtatctgcactcgcgtaagcgtcattagtacttggcgcactgtctacgcgccagataacgaaaacaagggcaaccagcgccaacgcaaccactaacagagcagggaatttactgcgaggagcttttttcggcgtactttccatgagcgcgtctcaaatagattagaaaaatgccagccagaacagcatggcgtagagagcaaaaagggcggtataaataattccgacaaatgccagattgatatttgcccgctgaataactcgcctcgtgatgagcgtcaaaataaggctggcaatggcgcagaaaaaccagctgggataataagcgccgatcaccgggattgccggagataatgagcatcccgaaaccatgaagacgggaattatccaggctgtttttttgagttgcatcgccatgcgagagagaactgttggcatattaaatacatcctgtctgctgcgaacaatatctgtagtgaatatcaatatccattgaaggcgtcagtatggctattttcttgatgaataaaaatagctttattcagccaccgcattcataacttatatattttatttattaattggctgtatatatttttaaaataaatacttttgggggcttcagcgcccccaaaagcgagtgacattaatttggggttacgatattcacccacaaatcgaaattatccagacaggcgataatttcttccagtttcgcgccattgccaataattttggctttcttcgcttttaccagatccgccattttggcttgtccggtcagcacggcgtgcagatcttcacggctgatgtagaaagaggcgtcggcttgcggttgcagcgttttccggtagttaagcacgctatcgttcagcgtcaggttgaggttatcgccgttgctcatattgaagttcaggctgatatttttacccgcagctttcgcgctatcgaggcgaacggccataaagtcgaacagcatttcgacgctcatcccgcgaatggtgtccggggaaccggtggtgccgtggctgaacttatgcaccccttcgcgcagctctttcgcgccggtcaggtagaaaccgcgccatgtggcggactcggcctgatagcccagctgttcaaagttattcgcttgcagattcttcgcgacctggtcacccgggttggcggcaatcacctgtttcagcagttctgcgctccagcggtaatcaccttgcttgttcgcttcttgcgccaggttgatgacacgggcagaaccgcccagcgcctgcacgtaacgtttacccatctccacctgaccatacggatgcaggttagccgggttaccgtcgtaatagccaagatagaagttatacaccgcgcgggcgttgtggctgacagaaccgtaatagccgcggctggcccagttattggcaagtgcaggcggcagcttaatcatgtcgccgatttcattcatggtgtagccctggttcgccaggtgcagggtctggtcgtgaatgtacttgatggtatcgcggtatttaccaatataatcattgatatgcttattgccccagaccggccaggtgtgcggcataaacagcacttccgcgtcgttaccccacatatccagcgtttcgttcagatactcggtccacttgctggtgtcgcgggttttcgcgccgcgcagagtgtagaagttgtgcagggtatgcgtggcgttctcggcggtacacagggctttcagggccggaatatagaagtgcatttcggctggcgcttcgctacctggggtcatcaggaagtcaaactccaggccgtcgataatcatcttctcgccagttctgacgatagttttcgtcggtgcaataatgctcgggtcgcccgttgccagcgtcacgccaaggccattacccacattgccttgcgcgttgtgcggcagtaacagaccgtaagagtagagcgcacggcggctcatgatgttacccgccagcacgttttcgctgatggcttcgtccataaagcctgcaggggcaatcacctgaactttgccggatttaacatcggcttcagagataatgcctttcacgccaccatagtggtcggtgtggctgtgagtgtagataacggcaacaatcggtttttgcggacgatgctggaagtaaaggtcaagtgcggcttttgcggcaggcggcgtcaccagcgggtcgataacaataatgcctttctcgccctcaacgaacgtaatgttagagatatcctggccgcgcacctgatacattttatcggtgactttgaacaggccagaaataccgttgatttggctctgacgccacaggctggggtttacggtttccggcgctgcggcattaatatcaaatttgtaatcgtccgcgcggtagtaaactttaccgttcgcatcacgcagaataccttcatccagcagcggggcgataaatccacgctgggcatcgtcaaaatcctgacgatcgctaaacggtaaacttttggcgtaattctgattaacctgttgggtatattgagtggcggctttcgcttcctctttcgcgttagcggtatttaccatcatgccgctggcggcagttaacgcaataacaatcctgctcaaacggaataaccgagagttattcatataaatctccatttatcatttatgtcgtaaatatgtaatccatgcaaaatacgtcatttaaagctggcgttatcataattgggaaattgcgactttaataagtggaagtgtgagcggaacgcgccattttattaggcatttgtgctgaagagggaaaattacagtaaaactatcattgcagaaaataatatgagtcgttttatgtgtttattatatatattgtacctgtcgttggcacagcgggacattgcgctactgtgccaacgttttactcatggggctttagcacagaactgtggcaaaaaacgttgatgcgccaatattgctgcaccctgagcgccattaaagtcagaagaactggcggcaataaagcgcacgacctgatgcggcagtggacggcgcaggtacttttgggtcatggcaacgagagtctcgcgtgggaaggcgggcatatccatcacgccaccgcccaggatcaccgcatcgggatcgaacagattaatgctggtggcaatggcccgtgccgcgttttcaagcagactctggacgaaaggggcgttttccgcatggacgaaaagatcgcgcaatgggtaatttcggggctgttgttcgtaccagcgtcttagcgccattccagagcaattggtttccaggcacccaggattgccacacgcgcagtgttgggtcatatctcccagggggatatgacccagttcgcctgccacaccgtgtgcacccgtccacggcgcaccgttcatccacactgcgaaccccatccccgtaccgagataggccgccagaaccagttgttgcgtaaggcggttttctactacgtcccaggagagttgcaggttaacgtcgcgggaaaactcaaccggacaattcagcgtattttcgagcttatcggcgagatcatataaatccgccgctgttaacggcaggttaggcgtagaaataatggtgcgtttatctttactgaccagcgccggaaatcccatcaccagaccatgacagcgagcgttaaagcgcctgagttgctcgtcaatcatttcgccgataccgctcaccaggccgggagcaatgacttctgcggtccgctttttttcgcagtgtagcgtttcaccttctgctgtccgcagacaaaagcggatatgcgttgcccccatatccacgcccgctacgacgttatgctgtttttgcatgaggctgtacctcgctttttgcagccagaatctgcgcggtcataattctccatgcttcgtcgatattttccgcatgattaaacaggccggaagtgccgacgataaagacatccgcccctgccgccatcagtttttcgtaagttgcctggttgcaggaaccgtccacctcaatttcgtactccagaccttctcgttcacgccatgccttcagttcggcaagtttatccagcatttcaggaatgaacggttgtccggcaaagccgggatcgacagtcatgaccgtaattttatcggccttatggatatagtatttcatggcctcaactggcgtctccgggttaaggatcagccccactttcatgtcatgacggcggatttcatcaatcaggcggaacgcctggccgttgatggtttccggatgcagagtgatgaaatctgctcccgcacgcgccagttgagcaatgtaatcctgcggccgcgtcaccatcagatgacagtcgagcggtttagttgccagttttttaacctgacttacgaagaacggactgagtgtcagattggggacaaagtgaccgtccatgatatcgatgtggaagtaatcggcatggctgtcgataaattcgatctgttctttaaatttcagcagatccatacacattaagctgggggagattttcatgttcaattccttacttactgataagacggtcaagggcgacagccgcgataattaatccgcccatcaccaccagttggtaataggtttgtacctgcaaaatattcagaccgttgttgatggtgccgatgatcaacccgccaatcaccacagagaaaatgcgccccttgccgccgaagaaactggtgccgccaatgatggcgctggcaatggcataggtttcaaaacccataccggcaagcggttctgcggcaccgagtcgtgcagtactgacgacgcctgccagacctgcacaaacaccggagatgataaacaccaccaggatgtggaatttcacgtcaatcccggaatagaacgcgctatttttgttgccgcccagtgcgtagatgttgcgcccgagccgcatacgcgttgtcagaaaccaaaggatgagcgcgacaattagactgaagataacggggacaggtatcccaattacgctggcggcaaagaagttcacgaagtcaaaactgaagccgtatacgctgttggcatcggagatcaccagcgtgatcccacggaaaatcgcgttggtgccaagggtgatgatgaacgggtgtagccccgtccagttgaccaggcagccgttgatcgcccccagtgcgccgccaaccagtacaccgccaatcatcgctgcgagaaacgggtcaacacctgccaacatcagtttggcggtcaccataccggaaagcgccagaatcgcgccaacgctgaggtcgataccagcgaccaggatagcgaaaaactcgcccatgccgatcaataccgtcacggagctttgaataaaaatctgggtaatattattggtggtcagaaaatattctggactcaggctaccaaagatggcgacgatgatcgccaggataaaaaaggtgccgtatttatcccagaacagcgcaaagttgaacggtttcttctcgctcgcttcgctttttactcttgtggtaaagcccatgccataatctcctcttcgctcatgtcatcgcgattcgtcaggatttgcgtcagtcgtccttcgcagaacacggcgatgcggtcgcagacggtgataatttcaggtagttcagaactcaccatcaggatgacttttccgtcgtccgccagttggcgcatcactttgtaaatttcggctttcgcgccaacgtcgatgccgcgggtaggttcatcgaaaataatcacttccgggcaacagcacagccatttggagatcaggactttctgctgatttcccccggagagttcggtgatattctggtttacgctatgacatttcagcgccagcagttcgcgttgattttcagcggtacgttgctcgtcaacttcatgaaacaagcccatcgcgcctttatagccgccgtctttcagactgcggctgatcgccatgttctgagcgatggaaaagttggggaaaaaaccgttatcccggcggctttcagtgatgtaagccatcccttttttcacggcatccaggggactacgtggagagatatctttgccattaagacggatttctccgccagcgcgtttatccacgccaaacagacaattcatcagttcagtacgtccggaaccgaccagtccggcaaagcctaatatttctccccggcagacgctaaaactgatatcccggaccttttttctgtcacgactggtgacgttccgcacctcaaaaaccgtttcgtgcgcaaggttgctgacattctccttcatcgcgttaaaacggttttgcagttcgcggcctaccatcagacggacgatatcgtcattactcacatcgcttactatgccgctgcaaacgctgctgccgtctttcatcaccgtatagcggtcgcaaatacggcgaatttccgccaacttatggctgatatagacgatggccgtaccctctttacgcaactgattcatgatcagaaacagatagtccacctctttattggtgagactggaggtgggttcatccatgatgatgactttggcatcgagcatcagcgttttggcaatttctagcatctgcttgtggctgatagataaattcgccactttctcatctagatcaactttcaagcccacgcgtaataacatcatggcggcgcggacacgcatttctcgccagtcgataatattgacgccacagatttttttcgtcagatgacgaccaatatataaattttccagtacggttaattcatcaataacgctgagttcctgataaataatcccgataccgagttgtgccgctaatttatgatccagcttgttatagctaatgttattaatggtaatggtgcctttggtcggctcatgtattccggataaaactttcattagcgtggatttacccgcgccattttctcctagtaatgcatgtatttcaccaggataaaccgttaaattaacgctctttaatgcgtgaaccggaccaaaggacttgccgatccccgccatgcttatatatggcgtggccataaataacctctctgcacgaaatatcgtattattgcctgatggctacatttatcaggtctacgttcaggttattttgttggccggataagacacttcattagcatcatcatccggcatcattcagttttattgagtgaccaggatactatcgaccagtttaaattccggtgctttatccagcgggataaccttgccggatttctcagcgtcaaccatcagcttcagacccgttgcgccgatatccgccgggttctgggcaaccgtcgcggtcatttgtccggcttccaccattttgcgggcttccggaatgccatctgtaccgacgaccagcacttttcccgtttttccggcgtttgcgactgcctgagcaacacccattgccatcgtgtcattcgcgcaatagatcgctttaatattcggattacgttgcaacacgttagtggcgacatccagtgctttaatgcggtcccagtcggcaggctggctggcgacaagcttgatctggcttgcttttttgaaggcttcggtggcaccattacgacgcgcttcaccggaggcgttaccggctttaccctcaatgattgcgacttcaccaccttcagcgcccaatttgtcaataatgaagctcgcgcctttcgccccgacagcaacgttatcggtggtgacaaaagcttccacattgccgccagcttttttcagattatccatgtcgattttttcatcgagattaaccagataaatgccttttttccatgcgcgggcgacaggcatgaccagattcacactggataatggagcgaaggcgatacctttgtaatttttattactgagatcttcaaataactgcaattgagattgaaaatcgccttcactaggagaggcaaaaatatcaacgctgacgcccagtgtttttgcttcatcttcaatgccttttttcatatctacccaaaatgggttggagagggttttcaatacgacagcatattcggcggcagcaaaagcgctggtactcaacattaagcccacgagtgtgccgctgaaatatttcagatatttattcataataatgttctcacggtaaggggacaggtaactccgcgatggcggaattacctttttcttatttcagcgcgcctggactgaagaaatcaacaattgcgccggttttttgcatattaatattagcttgttcaatgttgagctgggcgacagagacaaaaaaagcgtccagcaaagttagttgtaatattcttgcgctggcattacgacctaataacggcgtttccggggctggactgcaaataatataatcggccagtttcgctatcggactatggtagctatgggttatacaaataatctttgccccgttcttttttgccagttctacggccgcttttacatcactggttcgcccggaatgggtcactaccagcacaacatctccttcctgtaacaagctagcggacatcatcatgatgtgagcatcaggataggcctgacagcgtacgccaatgcgcaagaacttgtgctgtacatcagcacagatagcattacttcctccggcaccgtacaaatcccgctgtctggcctgatagaaaaagcgggcggcacggtggatctcatcaacgttgacgatgctctgaccttccataatggtgcgtaaagtgatgttaaataccttattcaccacatcctgcggcgcttcatcaaaagccaactcggaaggcaatacctgttcactctgagaaaaataatcttccagcgcactgcgtaagttacgaaagccgctaaaccccagcagcttacttaccttaactatcatcgcttcagataccgccagagcttctgcgacatctttaattgcgggtgcacaactcaggttaccgggtttgagtaaccactccacgatgcggctttcattttctgtcattccttcctgcttcattcgcaggtaaggcgctaaccctataccgttcggaagcgcactatcaaactcactctggctcatcacgttctcttgtccttgaattgaagacgccactatatcaccacagcaagaacagaaaagatgctggcgacttcacaaaaaaataaaatttataaagtttattttattgtgaacaatggcgagtggcttaaaattttatttcatttaattagtttaaaaacatgatgttatttgtttttctggttttttagatgatagatgttgctggatggtgagtgtctttaacgctattgcgctgtcagatgtaactctgtaaaacagatcaggaaggcgtaattcatcgattttgggtgtttttaattcattaacatcacaaatgttttttgattgtgaagttttgcacggacggggaagatgaatgaaaaagattgcatttggctgtgatcatgtcggtttcattttaaaacatgaaatagtggcacatttagttgagcgtggcgttgaagtgattgataaaggaacctggagcagtgagcgtactgattatccacattacgccagtcaagtcgcactggctgttgctggcggagaggttgatggcgggattttgatttgtggtactggcgtcggtattagcatagcggcgaacaagtttgccggaattcgcgcggtcgtctgtagcgaaccttattccgcgcaacttagccggcagcataacgacaccaacgtgctggcttttggtagtcgagtggttggcctcgaactggcaaaaatgattgtggatgcgtggctgggcgcacagtacgaaggcggtcgtcatcaacaacgcgtggaggcgattacggcaatagagcagcggagaaattgagattcatccactacttgcatggatgagtaatgattaatgtggatagagtttctttttgaggttggctaatgaaacgctttccgctatttcttttattcaccctgctcacgctgtccaccgttccggcccaggccgatattatcgacgacaccattggcaatattcagcaggcgattaatgacgcttataaccctgaccgtgggcgagactatgaagatagccgcgacgacggctggcagcgtgaagtgagcgacgatcggcgcagacaatatgacgaccgccgccgccagtttgaagatcgccgcaggcagctggacgatcgccagcgccagcttgatcaggagcgtcggcaactggaggatgaagagcggagaatggaagatgagtatgggcgatgaggttgggtatggagcaggcatcgcccctcaccccaatggggagagggagaaaacgagcgcaatattcaatatcgagcacaatcggtcccctcgcccctctggggagagggttagggtgagggggccagcgcgcacattccctctcatcacgccaccccaatctccatcccatcaaaccccacctcaaacccactcggtagtgcgttttccatcagccacgcatcaaactggtggctgatatgggtcagaatcacccgtgggctgcggataacctgattcagcgcaagcacggtatttaaatcacagtgattacgcggtgcatccgcgcgcggcgggtgactgcaatccatcaccattacctgcggctgattattgcgtaaaaatttcagcgttttttccggcaagcctgcggtgtcagacagccacgccacccggctgtgtgccgtttccagcagataaccgaaggtcagtttactgtggttgagcggcaggggcgtgacctgtaacccctgcaaatcaaacaccacaaacggttccaccgtgtggctgaaatcaagcaggcccggatgtttaaacagatcgtcgcagccctgttcatccggcgggccgtaaaccgggatcggatcgccaacgccccagcgcagcggaaacagcccctggacgtgatccatatgataatgcgtcagcaaaaactgctggaagcttccggggctccagcgatcggcgagatcgtgcagcccggcgtcgatcagggtgattgcgtcgttaaacttcactacgccgctgcacggttggcggcgatactgcgggctgcgccgcgctctggcgcaggccgcacactcgcagccccatgccggaacgccctgtgcgccgccggtgccggtgagcgtgagggtcaggctcatgttacagcgccttggtgaagcggaagtggctctgctcgtagccttcgcgcagatagaaacggtgcgcgtcgtggcgcttcacgttggtgctaagttcggtcatttcggccccggcctggcgggcttcttcttctgcccacgccagtaacttactgccgacgttcagaccgcgcgcctgcggcattaccaccaactcctgaatttcgccgatccagttgacatgatgcagatgaaactgcaaatgcaggccgatcatgccgacaacttcgccatcaagcagcgccagatggtagcgcatgtttgggtcgcgcagattggcgttaaaacccacgcgaaacgcgtggtggtcaaactccgcctgttttagctcacaaatcagcgcgtaaaccgcgtcggtgtcgtactgcgtggccgggcgaagctcacaagcaggcatggtgtttctccttctgatggatcagcgtcagcagcgtgtcgacgctctggcgcaggctgccgtcattgttgagcgtatggcaatcctgtggagtatagcgggcggcgcgcgccaggcgggcgttaatttcactggcgttttcacggccacggttttccaggcgctggcggaggatctccgggctaacctgtaaacagacgggcagcagcgcgctttgatagcgcgcccgcgcctgcggcagatgggcgcgactgccgttgaccagcacgtcgaatccggcgtgcagccagagatcaatctcgacgccgacgccataatacagaccgttagcgtgccagcttaaggccaacagattttgccccgcgcgggtaaaaaactcctgctcgctcagggcgatatggttttcacttccggcgctggcatcgcgcgtgatgtagcgatgcgccaccagtaactgagtttgttcccgcaggcggagttccgccagcaggctgtctttcccggagccggacggccccattaaccaaatcagttttcccatcatcagaacacccttttaccctgacgccagacgtggtcgatatgaatatgattgtccttgcgatgcgccagcaccaggtcggcgcgtttgccctcgccaatcaccccgcgatcctggagattaagcgcctgcgctggatttttagtcaccagcttcaccgcctgcggcagcgtaaagcggttgctctggtcatcggcgacgcgaaatgccgcatcgagcaggctggcggggtagtagtcggaagagaggatatccagcaggccaagctgcgccagttcactggccgccacgttgccggagtggctgccgccgcgcacaatattcggcgcgcccatcagcacgttcatgccatgcttgcggctggcttccgccgcttcgaacgtggtgggaaattcggcgatcacgctgccaagctggtgagattcagcaacgtgggcgtgggtggcgtcatcgtggctggcaagcgcaatttttcgcgcgcggcacagggcggcgatggattcgcgattcggctggctccagcgtgcggcgagcgccagttgctcttcttcgtactgctgcatctgcgcatcagtgagggagtatttgccctgataatattcgcgatacttctcgcggttggcgaactggcgctggcccgggctgtggtccatcaggctcaccagcgtcaccggctcgcgctgcaccagtttttcaaacagcggcagcgtggtgtgatgcggcagttcgcagcgcagatgcagacggtgctcggcgcggttgacgccgcgtttctgcgtctcttcgatggcgttgatcatcttctccagattctccagccgatcgccgccgtcgcgcacgtcgccaattgccacggcatccagtacggtggtgatgccgctcgccaccatcagcgcgtcgtggctgctcatcgcgctgtgggcaggccagtcaactttcgggcgcggggtgaagaatttatccagattatcggtatgcagctcaatcagccccggcagcagccagccgccttcgccgtccatcgcctccggcaggcggctctggctttcggcaaaggcgcggatttcgccgttctgcacctccaggctaccgcttaccacctcgttttccagcaccagcttaacgttattgataatcatgaagaggctcccattgggtgttagctcaactagaggctcccattgggtgcaggcggtcggcgacgtcattacgtacagcttcgtcatggaagatgcctacgatggctgcgccacgggttttggcttcgcgaatcagttccaccaccgcggcgctgtttttggcgtccaggctggcggtaggttcgtcaagcagcagaatggggtagtcgacgataaagccgcgggcgatgttgacgcgctgctgttcgccaccggaaaatgtgcttggtgccaggtgccacaggcgttccggcacgttcaggcgggtgagaagacgcgcggctttagcggcgcaggcttcacgcggaacgccggtatcgagcagcggctgcatcaccacttccagtgcactgatacgcgggatgacgcgcagaaactggctcacccagccgacggtggttttgcggatttccaccactttgcgcgctggcgcggtgaccaggtctacccactcgtcaccgtgtttgatctggatttgaccttcgtcgggcagatagttggcgtacaggctgcgtagcagagtacttttgccgctgccggaatggccgtggagcaccacgcattcgcccgcgttgacggtgaggctggcgcgattgaggacgggcaggcgcacgccgttttgctggtgcaggatgaaggttttactgacgttttgtacgttaatcatttttcgcctcgtggttcgggtgtcggatgcgacgctgacgcgtcttatccgacctacggggagcgcatttgtaggccggataaggcgtttacgccgcatccggcaccggctcaattctgcaaaacgctactcaccagcagctgtgtatacggatgatgcgggtcgtcgagcacgcggtcggttaacccactctccaccacttgcccctgcttcatcaccagcaaacggtccgccagcaggcgggcgacgcctaaatcatgggtgacaatcaccaccgcgaggttcagctccaccaccaggccgcgcagcaggtcgagcaggcgggcctgcacgctcacatccagcccgccggtcggttcatccataaacaccagcttcggatgcgtcaccaggttgcgggcaatctgcaaacgctgctgcataccgccggaaaaggtggtcggcaggtcgtcgatccggttggcgggaatctccacctcttccagccacttctgcgcggtggcacgaatatcgccgtaatgacgtgccccggtcgccatcagccgctcgccgatattgccgcctgcgctcacctggcggcgcaggccgtcgagtggatgctgatgcaccacgccccattcggtacgcagcaggcgacggcggtcggcctcgctcattgcatacaggctacggttctcgtagtgaatttccccctgctgcggcgtcaggcgcgcggagatgctcttcagcagcgtggtcttcccggagccggattccccgacaatgcccagcacttcccccggccataaatcaaaagagacatcgctaaagcctttgcccggcgcgtaaaggtgggtcaggttattgacgctaagtaacggttgattcattggttttttgcctcgctctgttggcggcaataatcggtatcggagcagacaaacatgcggtttccggcgtcatccagcaccacttcatcaagatagctgtgggtgcttccgcagatggcgcatggctcatcccactgctgaacggtgaacgggtgatcgtcgaaatcgagactttccacgcgggtaaacggcggcaccgcatagatgcgcttctcgcgccccgcgccgaacagttgcagggcgggcatcatgtccatttttgggttatcgaatttcgggatcgggctcgggtccatcacgtagcgcccatttaccttcaccggataggcgtaggtggtggcgatatgaccgaagcgggcgatatcttcatacagtttcacctgcatcacgccgtactcttccagcgcgtgcatggtgcgggtttccgtttcgcgcggctcgataaagcgcagcggctcggggattggcacctggaagataattatctgatcttcggtcagcggcgtttcggggatgcggtgacgcgtctggataaccgtcgcatcgtccgtacgttccgtggtgtttaccccggtcacgcgcttgaagaagttgcgaatgctcacggcgttggtggtgtcatccgcgccctggtcaatcaccttcagcacgtcgctttcgccaatcacgctggcggtaagctgaatgccgccggttccccagccgtacggcatcggcatctcgcgcccgccaaacggcacctgataaccggggatcgccaccgcttttaagatggcgcggcggatcatgcgtttggtctgctcgtcgaggtaggcaaagttgtagccgctcagattagccatggttctgctcctgttgcagacgtttgagtagctccagttcggcctggaaatcgacgtagtgggggagtttgaggtgactgacaaagcctgcggcttcgacgttgtcggcatgtgccagcacgaactcttcatcctgcgccgggcctgtcgcgtgctcgccgtactccggggcttgcagagcgcggtcgaccagcgccatcgccatcgctttgcgctcgctcatgccgaacaccagcccgtagccgcgcgtgaagtgcggcggctcacccggcgggtcgataaaaccgttaaccatttcacactcagtcatcagcagttcgccgacgttcaccgcaaatcccagctcttccggcacaatgctcacgtcgatatagccgctgcggatctcgcctgcgaacgggtgattgcgcccgtaaccgcgttgggtggagtaggccagcgccagcaaatagccttcgtcgccgcgcatcaactgctgcaaacgggaggagcgactgcaggggtaaaccggcggcgtgcgggtgatgtcatccggctgtgcgccgctatcctcttcaaacttcgccagcccctgacgcgccagcaggctgaaaacgtgcgggctcggctgctgttcgctgtcggcggtggtcagcgtcggcgcttcgccgtttgccagcagggtaaaatcgagcaggcgatgggtgtagtcgtaggttgggccaagcagctggccgccgggaatgtctttataaacggcggagatacggcgttcgagacgcatcccggtggtgtcgagcggctcgcttaccgccagcttcgccaacgtggtgcggtaggcgcgcagcaggaaaatcgcttcaacgttatcgccgctggcctgtttcagcgccagcgccgccagttcgcggtcggcaatgccgccttcggtcatcacgcgatctaccgcgaggttaagctgctgttcaatctgggcgacgctcagttcgggcaaatcggtatcgcctcggcgtcggctctcttgcagggcgtgggcggcgtcgatcgccttctcgccccctttcacggcaacgtacatcagcacacctccacatgagtggttcgcggaatagccagcaggcgctcgccacaggtcaggatcaggtcgatgccgagcgggaacggatgcgggcgctcggtgagttcgtgcagaatgcactccggcagctgcggagcgatcattcgttcttcggcaatacccgcaccagtaaggcgcaacatgcgtccgccgctcaggctggcgacctgtaaaatcagcgtcgcacccgcttccggcgcaacggcggtgccggtggaaagggcgttgagctgttcgctggaaatcgcctcatccgtcaccgcgaaggtcgcctgttccggctggctgaccagcggcgcgttggtatgaaaacgcaggctctggttgacgatatcgttatttaatggggtagaaagccacaccggcgtgtcgttatcggccagcgtcagcagcacgctggtggtggcgatattcagcggttgccagccgcgtttgagctgatgcagggcgacaatcacgcccggctcgctcatggcctttaacaggcgacgaaaactgtgctgggcatcctgcacgggaagcataaaagcggtttccagggtcatgcgttgtctccgcgaaccatcgtaaagaagtcgacccggctggcgttcacttcggcctggcgtgcggcaatgcgtgccatacggtcagcgtccagcggggcaataagggtttcacttaagttttgaaagtggcgagattgctgcatcagcgcgtcaatcagcgcgcagcgttcggcgtgctgtttatcacgcccctgcacccagctgtagccgagcgtgccgtcagtcaggcgcacggcggcgcgggtcagcgtggcgtcgccggcaaaaaaacgttcgccggtgccgcccatccgcgcctgaatctgtaccaggccagtttcagcggcgcggatcacctcatagtcggcggtgatgtttagcgcgttcaggcgtgctgccagttcagccggttggctgtgcgccagcacggacatccagtgctggcgggtcgcggtatctgcgtgcattcagtgctccatagtgaattcaatcatgtcggcgcgcgtcaggctgacggagtactccgccgggctgctttcaccgtcacggtggttaagggtgcgcacgcacagcagcgggctcatattcgggatttcaagacgctggcactctttggcctgggcgcggcgggcgctgatccgcgtctggctgcggcgcagcgcaattccggtttgctcgcgcagaaaatcgtgcaggctgccgctgtcgaagcgttgcagcgtcggccagagggtgaggtccgcgaagtagtggtcgattaaacagagcgcgacgccgttgacacgacgcagggtgcgcaggtggatgacgttctccccctcggtaatccccagtgcgtcagcgacgtggccggacgcggggcgcaatacgctaagcagtttttcgctggtgggatggctgccctgatccagcagattctggctaaaacgcgcctgggcgttgagcgggtaatcgaacgggcgcatcagcaccagcacgccgacgccctgacggcgctgtacccagcctttttccaccagttggtcgatggcgcggcgcagggtgtggcgattcacctcaaagcgcgctgccagttgctgctcggcgggaagatagtcgccgcagcggtagtgttgacgaagctcctgctcaagttttgcggctatctcttgatagcgtgttgggtagctggtcggatgtgtagacaagtgcatagatatcaatgcctcgcttatcagataaagtgcttacgcaaccgttgagagaggaaatccagcaggctgaccgtgacgatgataagcaccatcagggcgcaggtttgttggaactggaaaccgcgaatcgcttcccacagggtgacgccgatcccgcctgcgccgaccatgccgacgacggtcgccgagcggacgttggattcgaagcgatagagggagtaggagatcagcagtggcatcacctgtggcagcacgccgtagaggatctcttcgagcttgttggcaccggtggcgcgaatgccttccaccgggccgggctcaatcgcttccaccgcttcggaaagcagcttggagagcacgccggtggtgtggataaacagcgccagcacgccagcacgccagcgaacgggccgaggccgacggcgaccacgaacagcatggcgaagaccatttcgttaatggcgcggcaggcgtccatcaggcggcgaacgggctggtaaacccaccacggcaccaggttttcggcgctcatcaggccaaaggggatggagagaaccaccgccagcgcggtgccccagacggcgatttgcagcgtgacggccatttcggtgaggtaatcctgccactggctgaaatcgggcgggaagaagtcggcggcgaacgtcgccatgttgccgccgtctttgatcagcgtaagcggggccatttccgcgccctgccacgagacgaccaacacggcgagtacaacggcccagctcagaagcgagaaccagctgcgcttgggtggggcgatggtgatggtttgcatgtttggctccggtctgtaggccggataaggtgcttgcaccgcatccggcatcaacgcctgcacattgtcggatgcgacgccggggcgtcttatccgacctacgatttactgcaccgctttactcacgctactcatcgcgcttagcgcgttgttcaggcggtccaggtcatccagctgcgcctgaatctcggtggtttttgccagcttgtcctgctcattcagtcctttattgcttttcacgccctgcatctctttaaacagcgcgagctggcgaatcggcaccagttgcaggtcgctggaagcgcggaatggcgcccagcccaggcgttccagcaccgctttttcttccggcgttttgccgtagttcataaagaagtcgtagatcttgtctttggtggtttcggaaagattcttgcgccagacgatcggatcgcctgggatcagcgggctcttccagatcaccttcagttctttcagcttctctggcgcggaggttttcagcttgtcgaggttttcggtgttgttggtggcaacatccacctgcttgttggcgacggccagcgcgttggtttcatgcccggcgttgacggtgcgcttgaagtcgctggcggagatattgtttttggcgaagacgtagtagccggggacgaggaagccagaggtggagttaggatcgccattgccaaaggtgagatctttccgcttcgccagcagatcgttcaggttgttgatcggactgtctttgttgacgatcaacacgctccagtaacccgggcttccatccgccgcgaccgtctgggcgaagacctggccattggcgcgatccaccgcttccatcgcgctcagattgccgtaccaggcgatatccactttattgaagcgcatcccctggataatgcccgcgtagtccggggcaaagaaggcgttgaccttcacgcccagcttcttctccatatcctgcaagaacggcgtccattgcggtttcaggttttgctgactttccgtactaataatgccgaaattcaacgccttttcctgctcttcggcgtgcgccgggcttaacagggtgctgaggctgaacatgctggtgaaggccaggctggcaattatcttagcgttcattcgttttcctcaatgatggggatgtcaggcagctttcgcgttctcttcgacgcggttaatgctgcggtagagatggtcaaaacgttcgttatcaaactgttggctgctgccgtcgtagaagacgtgcccctggcgcagggcgacgatgcgttcgcagtagcgcagggcgtaatccacctgatgcagcgtgacgaccacggtgatgccgtcgttctggttgatgtcgcgcagggtgtccatcacgatgcgcgcactttctgggtccaggctggcgatgggttcatcggccagaatcactttcgcctgctgcatcagcgcacgggcaatcgccacacgttgctgctggccgccggagagggtggaaacgcgctgatgggcaaaatgcaccatgccaacgcgggtcagcgcctgtaacgcgcgctgtttctgctcgccggtgaaccagctaaaacaggtgcgccagaacggcgtgctgccgagcgcgccaatcagcacgttctccagtacgctcaggcggttcaccaggttgaattgttggaatatgtagccggtatgggcgcggcttttgcggatatcgcgggccaggcggccttcgcgctggactgtgcggcccagcagctcgatatggctaccgacagatttatcgccggtaatcaaaccgcttaagtgacgtaaaagggtggattttccggaaccgctcggcccaagcagagccaccatttcaccgtgatgaatgttcagatcaaccgcatgcagcgcctgatgctgattgaaggttttggcgagcttctcgacacggataatcgtttgcatgatgcagcctccctaaaaaagtggctccatcgtggcggattattgtgacgatttggttaattaaaagtgactaacagatgaagagttaacgggaattcgatgacagtgcgggagggcgggcctcccggcgggttattgcgttggttgttgtttgacgacattaatcatccacggtacgccaaatttatcggtgactttgccaaagccatgcgcccagaaagtttcctgccaggccatttcgatttttccgttagcggcaagattgtcaaaccagcgttttccttcttcgacctgttggctatcgagcaccagcgtaaagccggagtagctggcttttccactcggcatggcatcgctcatcatgatgtcgcttccggcaatgcgcacattggcgtgggcgatggcggtatcgggaaattgcattccggaagggcagttctcggcgctgtcctgcgcactttttggcatttcgccgaagctgattttatagagcagttccgcgcccaacgtacgttgataataggcaatcgcgtcggaacagttaccggcaaaagagaggtagggacttaacggcatgatggtgacctcagttaagagaagccagttaagtgtagttcgaaatttatacagatgagaggcggcctgataagacgcgcgagcgtcgcatcaggcagtcggcactgttgccggatgcggcgtaaacgccttatccggcctacggagggtgcgggaatttgtaggcctgataagacgcgcaagcgtcgcatcaggcagtcggcaccattgccggatgcggcgtaaacgccttatccggcctacggagggtgcgggaatttgtaggcctgataagacgcgcaagcgtcgcatcaggcagtcggcaccgttgccggatgcggcgtaaacgccttatccggcctacggatggtgcgggaatttgtaggcctgataagacgcgcaagcgtcgcatcaggcagttggcactgttgccggatgcggcgtaaacgccttatccggcctacggagggtgcgggaatttgtaggcctgataagacgcgcaagcgtcgcatcaggcagtcggcaccgttgccggatgcggcgtaaacgccttatccggcctacggagggtgcgggaatttgtaggcctgataagacgcgcaagcgtcgcatcaggcatctggcaccgttgccggatgcggcgcgagcgccttatccggcttaccgatcacaatacaatcagttctttttcacaaactcagatttcagtttcatcggaccaaaaccgtcgattttgcaatcgatgttatggtcgccttcaaccaggcggatgtttttcactttggtgccaattttcagcatgctagagctacctttcaccttcagatctttaatgatggtaacgctgtcgccgtcagccagcagattgccgttagcatctttaacgatcagctcgtcgctttcctgtgcaggttctgcgtcgttccattcgtaggcacattccgggcagatgtacatgccgttatcttcgtaggtgtattcggagttgcattttgggcagtgtggtaaactcatgtggatttcctcaaaagtcagcagggcaaaagcgccaaaaaacggcagattgccgaaaaaggccgcaattatacacaaaatccctgagtttgtcgggggtactgctgattttagacgacgatcgttttcatttgaaaggaaacgcaaaaagaaaataatctttttgcctctatttattatttaagataatgttaatgctctacttgttctttttttaattcacatgatatttttatctttctgacgttttaaacgtatcagaagacgttatttattctgataaaaaacaacacactaaatataaaattatttcttgcagtaattataaaagccgaaaacagaactcaaaaacaatctggctaaataaaataacaaaatttgctttaaggaagaattttctatgtacacacagaccctgtatgagttaagtcaggaggctgaacgcctgttacagctttctcgccaacagttgcagttactggaaaaaatgcctctctctgtacccggagacgacgcgccacaactggctttaccctggagtcagcctaatatcgccgaacgtcacgcgatgctgaataatgagttgcgtaaaatttcccgactggaaatggtgcttgcaattgtcggtaccatgaaagcagggaaaagtaccaccattaatgccattgttggtacggaggttctgcctaatcgtaatcgcccaatgactgcgctgccgacgcttattcgccatacgcccgggcaaaaggaaccggtactgcattttagtcatgtcgcgccaatcgattgtttaattcaacaattacaacagcgcctgcgtgattgcgatattaagcatctgaccgatgtgctggaaatagataaagatatgcgtgcgcttatgcagcggatcgaaaatggcgtcgctttcgaaaaatattatctgggtgcccagcctatttttcattgtctgaaaagtttgaatgatttagtgcgactggcgaaggcgctggacgtcgattttcctttttctgcttacgccgccattgagcatattcccgtgattgaagtggagtttgtccatctagcggggctggagagttatcccggtcagttgacgttactggatacccccgggccaaatgaagccgggcaaccgcatctgcaaaaaatgcttaaccagcagctggcacgcgccagcgcggtactggcggtgctggattatacgcaactgaaaagcatctccgatgaagaggtccgtgaggcgattttggcggtggggcaaagcgtgccgctgtacgtgctggtcaataagttcgatcaacaggatcgtaacagtgacgacgccgaccaggtgcgggcactgatttccgggacgctgatgaaagactgtattacgccacagcagatatttccggtgagcagcatgtggggctacctggcgaatcgggcgcgctatgagttagccaacaacggtaagttaccaccgccagagcaacaacgctgggtggaagattttgcccatgccgcgcttggcaggcgctggcgtcatgccgatctggcggacctcgaacatattcgtcatgctgccgatcagttgtgggaagatagcctgttcgcccagccaattcaggcgttgcttcatgccgcttacgctaacgccagcttgtatgctctgcgatctgccgcgcataaactgttgaattacgcgcagcaggcgcgggaatacctggattttcgtgcgcacgggttaaacgtcgcttgtgaacaattgcggcaaaatatccaccagatcgaagaaagtttgcagctattgcaactcaatcaggcgcaggtgagcggcgagattaaacatgaaatcgagctggccctgacctccgccaaccactttctgcgtcaacagcaagatgcgctgaaggtgcagttagccgccttgtttcaggatgatagcgagccgttaagcgagattcgtacccgctgtgagacactgttacagacggcgcagaacaccatcagtcgcgactttacgctgcgttttgccgagcttgaatccaccctttgccgggtgttaaccgatgttattcgccccattgagcaacaagtcaaaatggaattgagcgagagtgggtttcgtcctgggtttcattttcctgtttttcacggcgtagttccccacttcaacactcgccagctgttcagtgaagtcattagccgccaggaagcaacggacgagcagagcacgcgtttaggcgttgtgcgtgagacttttagccgctggttgaatcagcccgactggggacggggaaatgagaaaagtccgacagaaacggttgattacagtgtgttgcaacgagcattaagcgcagaagtcgatctctattgccaacaaatggctaaagttctggcagagcaggtcgatgaatctgttacggcaggcatgaatacttttttcgctgagttcgctagttgtttgacggaattacagacgcgtttacgcgaaagtctggctctgcgtcaacaaaatgaaagcgtggtcaggctgatgcagcagcaattgcagcagactgtgatgactcacggctggatttacaccgacgcccagctgttacgcgatgatattcaaacacttttcacggcagaacgatattgaccaagacgttacttgacggccccggtcgcgtgctggagagcgtttatccccgctttttagtggatctggcgcagggtgatgatgcccgccttccacaagcccatcagcagcagtttcgtgaacgactgatgcaggaacttcttagccgtgtgcagcttcagacatggacgaacggcggcatgttaaatgcgccgcttagcctgcgtctgacattggtggaaaaactggcgagcatgctggatcccggtcatctggcactgacgcagatcgcgcagcatctggcgctgctgcaaaaaatggatcaccgccagcactctgctttcccggagctcccccagcaaattgccgccttgtatgagtggtttagtgcccgttgtcgctggaaggaaaaggcgttaacgcaacgaggcctactggtgcaggcaggtgatcagagcgagcaaatttttacccgctggcgtgctggggcgtataacgcctggagcttgcctgggcgctgttttatcgttctggaggagttgcgctggggggcatttggcgatgcctgccgtctgggaagcccgcaagcggtggcgttgttgctgggtgatttgctcgagaaagcgacacaacatctggcagagagtatcaatgcggcaccgaccacgcgtcactattaccatcagtggtttgcctctagcaccgttccgacgggcggggagcatgctgattttttaagttggctgggaaagtggaccacggcagataaacaacccgtttgctggagtgtgacccaacgctggcaaactgtcgcgctggggatgccacgactctgtagtgcgcagcgtctggcgggggcaatgctcgaggaaatcttctctgtaaatttggcgtaaataatcagttacatcaatgagtcctaaacgaaatccatgtgtgaagttgatcacaaatttaaacactggtagggtaaaaaggtcattaactgcccaattcaggcgtcaactggtttgattgtacattccttaaccggagggtgtaagcaaacccgctacgcttgttacagagattgcatcctgcaattcccgctccccttttgcggccgtcgcgctgatttttctggcgtttgcggaaatgggccaactctgcgaggaaagctatgctgaaaaggaaaaaagtaaaaccgattacccttcgtgatgtcaccattattgatgacggtaaactgcgtaaagccattaccgcagcaagtctgggtaatgcaatggaatggttcgattttggtgtttatggttttgttgcttacgcattaggtaaagtttttttcccgggggctgaccccagcgtgcagatggttgctgcacttgccactttctccgttccctttctgattcgaccgcttggcggactcttctttggtatgttgggcgataaatatggtcgccagaagatcctcgctatcactattgtgattatgagcatcagtacgttctgtattggcttaataccgtcctacgacacgattggtatttgggcaccgattctgctgttgatctgtaagatggcacaaggtttcagcgtcggcggtgaatataccggggcgagcatatttgttgcggaatactcccctgaccgtaaacgtggctttatgggcagctggctggacttcggttctattgccgggtttgtgctgggtgcgggcgtggtggtgttaattagcaccattgtcggcgaagcgaacttcctcgattggggctggcgtattccgttctttatcgctctgccgttagggattatcgggctttacctgcgccatgcgctggaagagactccggcgttccagcagcatgtcgataaactggaacagggcgaccgtgaaggtttgcaggatggcccgaaagtcagctttaaagagattgccactaaatactggcgcagcctgttgacatgtattggtctggtaattgccaccaacgtgacttactacatgttgctgacctatatgccgagttatttgagccataacctgcattactccgaagaccacggggtgctgattattatcgccattatgatcggtatgctgtttgtccagccggtgatgggcttgctgagtgaccgttttggccgtcgtccgtttgtgctacttggtagtgttgccctgtttgtgttggcgatcccggcgtttattctgattaacagtaacgtcatcggcctgatttttgccgggttactgatgctggcggtgatccttaactgctttacgggcgttatggcttctaccttgccagcgatgttcccgacgcatatccgttacagcgcgctggcggcggcatttaatattagcgtgctggttgccggtctgacgccaacgctggcggcctggctggtcgaaagcagccagaatctgatgatgcctgcctattacctgatggtagtggcggtggttggtttaatcaccggcgtaaccatgaaagagacggcaaatcgtccgttgaaaggtgcgacaccggcggcgagtgatatacaggaagcgaaggaaattctcgtcgagcattacgataatatcgagcagaaaatcgatgatattgaccacgagattgccgatttgcaggcgaaacgtacccgcctggtgcagcaacatccgcgaattgatgaataagctgaaacggatggcctgatgtgacgctgtcttatcaggccaattgaactcttaaggttcacttaatctctgacgcgcatactctcctccaggttaacggaggagagtgcaatgaaaaaccgtgtttatgaaagtttaactaccgtgttcagcgtgctggtggtcagcagctttctttatatctggtttgccacgtactgatctttcttcagccgtacccaggcccgcgtgccggaagtctcttgccggttttgcaggaaaaactgcccgtgatgcaactgtgtaatgcggctgacaatacttaaccccagaccaatcccgccataacggctgtccatacgtacaaacgctttactcaactccccgcatttactctcatcaatacctggtccttcatcttcaactgccatgaccgctccgtcatcttcttgcagcttaatcataatgttgctgccttgcgggctgtaacgatgggcgttttctaccaggtttcgcaataacatccgcagcagggttgcatcaccctgaacggtgatgtcggcggcgctctctggcaatagcagggtttgctgtcgctggtcgagcatggtactgagttcgtcatagctggggagaatgacatcttccagcagttttacatgttgataattaccggaagaaaaactctgtccggcacgcgccagttgcagcagctgggagacgctctccatcatctgatcaagccgtgccactaacggtgctacatcaatgtgatgcgttttcgccagcagttccagatgcaaacgcacccccgccagtggcgttcgcagttcgtgcgcgacgtcagcggtaaacaacctttcgttatccagcgtgctggtcaggcgactgaccagatcgtttaacgcgctaaccaccgcttcgatttcgagggtggcgctgtgaatggcaatgggcgttaagttgtcggcggtgcgcgcttccagctctttttgcagctccgccagcgggcgggtgatgcggcgtaccgcctgatagcagataaatagcgtcaggctgaccataaagacgccggggacaatcaggctggcgaccgcctcgcggatctcacgcatgatgtggcgatcgttgttgcgattgtcgcgtagcgcctgctcaaacagctgaatctgctcggtactttcatgccatagccagaagacgctgatcagctcaaacaccaacaaaatggccccgatggtcaatatcagccgttggcgcaggcttattggtcggcgcagaaaatgcatcagattcaattagttttcctcattcgcgaccagcatatagccaaagccgcgcacggtgcggatacgggctttgcccactttgtcgcgcagattgtggatatgcacttccagggtgttggtgctgggttcattgtcccagttatagatgtcgttgtagagaatttcccgatgcaccggactgcctgctttgagcattaaccgactcagcagagcatattctttgggcgtcagaatcaactcttcaccgcccatccatacctgacggcgacccatgttcagcgtcagattgccaacaatcagctcactttcgccctgattattatggcgtcgtagcagggcgcggatacgggcatgtaactcttccagcgcaaaaggcttcaccagatagtcgtcggcaccgacatccagcccggcgattttgtcggtcagcgtatcgcgagcggtgaggatcagtaccggcagggtatattttttctgccggatacgggcgagaaaatgcagtccatcttcgtcgggtaaccctaaatccagtaccaccaggctgtaatgacctgcctcaaggctttgttccgccatccgcgcggttgtcacgctatcgcacgcgtagccttcggtttgcgccgccagaatcagtccctgcaataacagcgtatcgtcttcaacaatcagaattttcattcactcactctcctgcaagtttgcagaatatcatccgcagcctggtaatacttcgtctcaacgccagttaatcccaatagcgtggagaataaattgtcttgactatagtgttgcgtttgcgcctgtttttgcaggcagttctggtcaacctgataccgtttttgataatcctcgctcagccacagcagcatcggcacctgtttttggctatccggggcgatggcataaggcagaccgtgcagatagatgccattttcacctaagctttcaccgtggtcagaaagataaaccaggctggtggtaaatttatcctgatgttctttcagcagattaatcgctttatcaacaatatagtcgacgtaaaccagcgtgttgtcgtaagtgttcaccagttgctctttggtacaggtctggatctcattggtgtcgcaggttggggtaaatttcctgaactgaggcggatagcggttgtaataggtcggaccgtggctgccgatggtgtgtaagacaatcacgccatcaccttgcaggttattgatgtactcttcaagcccgtggaacagcacttcgtcatagcattcgccgttgatgcactgatcaggtagattcagcgcggtgacgttctggtgaggcacgcggtcgcaggcacctttacagccgccatcgttgtcattccacagcacgttgatgcccgctcgctgaatgatatccagcacgccttcctggtgctgtgccagctcttctttgtagtgctcacgcggcatatcgctgaacatgcacggtacactaactgccgttgccgtgccgcaagatgcggtattagggaaatagaccacgttatctttcgccagccgcgggttagtttcacgcgggtagccgttgagggagaagttctccgcccggctggtttcgccgacaatcaggatggtcaaatttttacgtttttcgttctgcattaacgggttgcggtgcgcgtcttcaccaattcgcaccagcggcagatttgccagtcgctgatgggagtaccaactccagctggcaacaatgctgttagaggggcttaaggatttcaccagctctttgttattgcggaacaagctggcgtagtctttataaaacagtgcggcgaccagcaaaatcagtagtacagaaaccagaatattggctccacggaaaagaacactgcgcagacggctggtggcaggtttgatttttatccagcaggcaatcagcgcagcaagcacgccgctgaatcccagcgttaataacatttgcggtgtcatcagcgcataactttctgccggagtggtatcaataatattggcaatcatgctgcggtcgatgacgatgccgtaagtcattatgaaatattgtgcagccgcgccaaccagaataaacaggcaggccagtggtcgattaagccataagaaagagcttagtgtcaggacaatattaatcacgctgaaagcgacgaccggcatgctcaagaaaaccagtacgttatgcaggctatccagcggcagcgcctgcaacacctgtttaaaaaaggcaatattcaggcagatagagatataaaaagcggccaacaatagccaggcgagtaaattcaaagagggtctttttagtaggcgcttcaacatcacggtgtttccatcgaacaaagtgcgcatatgctcgcaaagcaaaattaagccaaccttaagttcttaaggttggcttttatgtttgctggattaaggggaattaatctttgcttattggtgcatctaagggatacgggtttttatgtagccggttgtaattcagcgcatacatggcggtgatgaccatcagggtgacaaaactccacataacctctttcgctccggaccccaccacggcccagatgcagtagaggaaggcaatggtagtaactgccagatatgccgggcgtgctttaccaaagtgaccgtgtccgagcagcagtaacgccgcacaggtgtaaagatatggcaccagtgtaaagatgacgctgacggaagaaaccagaccgaactctttggtcgcgtttggactaatgctgctgagctggaagatggtcatcaaaataccgacgataatcagccccgccactggcgtacccgctttatttacacgggcaaaaatcggtgggaacagtccgtcatcggcagcggctttcgccgtttgacccgccagcaacgtccagccgcccagactacctaagcaacccgcagctgcgcagaaggaaacaatggccccggcggtgtcacccaacgccatccgtgcggcatcaccgaatgggctagcagaaacgcgcagtgcggcattagggatcatccccataatcgcggtggtagaaagtacatagcaaacggcggcaatcaataccccaccaatggtggcgatagggacattgcgtttcgggtttttcaccacacctgcggcaacggaggcactttccacaccgatgaagctccacagcgtaacgttaagggtactttgaattgcaccgaaggtgcccaggccgctgacgttccatgccgccatataggtttcaccacggaaccagaaccagccaaatacggcaatcccgacgatggggatcagcgccagcacggtggcaactgcctgcacacgggtgatcattttcggaccgacaatgttcagcaggacgaagatccacagcaccacgacgcaggtgatggttaataccaatggatctttcagaatcgggaagaagtaacttaaatatcctacgccaatgaccaccatggcgatattgccgatccagcaggccagccagtagaggacgttggtttgataaccgagaaacgggccaaagcagcggcgggcgtaagcgtaagaaccaccaggacttgggtcgaggaagctcattttggcgtataccatgctgagccccagtgcaccgataatcgtcaccaaccatccataaatggcaatcccgccagtagaggccaggtttgcaggtaacagaaaaacaccactccccataatattcccgctcaccatcagggtgacggggattaagcccactttgtgagcatcagcatcgctagacataattaaactcctgcgaaggcgagcttcgtgacaataaattacgtcatatcatacgcctgcattcgatagttgaattattatcgaccgggttatcgctgatgccgttattaatatagctcttcgttaaggttaaaaatcaggcgacagtgcgttctctgtgctgactaacataatgcagcggcgtcataccgtagaagtctttaaagacagaaataaagtagctcgtactgttgtagccgcaggactgacttacctgagagatatttttaccgtccatcattaattcatttacggcataacgcatgcggcaggtggtgattatttggctataactggtgttttcgcttttcaactttttctttaacagacttgggctaagacataaacaactggctaccatactaagattccagtctttgtgaatatcgctttcaataatttgataaacgctgtcacttacacaattacgtaacatatacatcattaaactaacgaattttttactgtcgagaaaacgggatagcaccgtgaataataatgcgcgtgttcgttccttttcactctcagtttctgcgggcatcatgctgtgttgcgcggcaacgcgaaagacgtctggcgtcaggcatggcagggtgagtatgggcgtagcgctacgttgccatactggtatttggctgagatctttattcagaaaccggaggtaatctttgatgatgtcgtgactaatatgagcaaccaaagtgttgttaagagaggagacgtcgataatattattttcacaatttaataacgccatatggttagctttaaggctaataggttctttcccattcacccttatccagacatctttttcagtcaataaaacaatacaaggttggtcgctgcaaatcctcatacatgtactcctgagtgcgaataaaagaccagttctcgctaaagcaaagcgataccgggaaatggttatataattgtatgatgaatataaacatgcataaaaataacgagttttactaatagtacaaatttttatagtaatttctcatgtacatatttttttacaggataaataacaggcaaaaaaaagcgcggggtggggccgcgcaaaaagtatgacatttttgtttgcagcaatttttatgaaaacgttgccatactcaaaaggcctaaggccaggcggcgtaatgttatttaaacaattacgccttcagcggaatagtggttacgctttcacgcacataacgtggtaaataccgtcaataatttcagtcccttcagtttcgtgttcaaatccagggaaatggtggtcccaggattgcaggctgcgtaaataacttacttgcggactgtttttatcgccgaagttttcaccagacagcagcatcgggattcctggcggatacgggataacactgtttgccgcgatgcgtcctggcagattttcaatggataccagttcgacattgttgtcgacaatcgcgttgtacgcttcacgcggggtgacttccgccaccggcaggccggaataggcttcgttcaaccgtgcgccagggttgttttctttcagccaggcaaacatggtgtcacccagatcgtgaatccccatgttcgcgtaagtgtcaggatattgttcaacaagttccggcatcacctgcgccagcggtgtgttggcgtcatagtggcgtttgaaggagcaaagggtgttaaccagagttccccatttcccacgggttacgcccatagagaacaggaacataatttggaagtcagtggtgcgggtaggtacaatgccgtggcgaccaagccaggcagtgaccagcgccgccggaacaccggtttcttccagttcaccatcttcacccattcccggagcaaggatgctgactttaatcgggtcgagcatactccagttatccggaatatctttgaagccgtgccagctttcgcccggatgcattacccagcagtcctgaacggtggtcagcagtttggttggtgcgtcagcaaagtcataggttttgccggtttgtgggtcggtgacgacttctttgttccacggtttgaagaaccagctaccgtcagcggtgaactctttatatagccgcgccatcgcctgacggaaatcaaccgcttcgtcaatcacttcctgtgtcagactcaggccgctgttgccgtccatcatgctcaccgccacgtcgttggatgcgcagatggcatacagcggggaggtggtggcatgcatcatgtaggcctggttgaagcgggagaagttaatcgccccacgaccttcacgtacatgaatataagaagcctgactcagcgcattcagcagtttgtgggtggagtgggtggcgaaaacggtaggaccgttgtgatcgccaggttcgccgcgcatggcatagtgatcggcatagatcgggttgaaacgtgcatagccgtaccaggcttcgtcaaagtgcagacgatcggaggttttttccagcagatcctgcgcttctttagcgttataacacacgccgtcataggtgcagttggtcaccacgcagtaagacggtttttgcccggctttgtctttggtcagcgggctttcactgattttcttctgcaaggtttcaggttgcatttcctgcggatagattggcccgataatgccgtagcggttgcggcttggcaccatatagaccggtttcgcgcctgtcagcatcaaaccttgttcgatggatttatggcagttacggtcaacgaccacgacatcgttatcggtcatgcaagcctgcatgatggtgcggttagagccggaagtaccgacgactacgctccaggagcgatcggcaccaaatacgcgtgcggcatatttttcgctttcgccaaatgcgccagtatggtcaagcaaagaaccgagggaagttcgttcgatgcccatgtcggtgcggaacagattttcaccatagtagtcatggtagaaacgtccggcgggtgttttggtaaaaccaacgccgccctggtggcctggcgctgcccaggaatattcatggatgtcactatatttcatcagcgcgctgaacagtggcggcaacagctgctggcggtagcgggtcatcgcggcaacggcgcgtccggcgataaagtcggcggtatcttccagaatccaggcgaattcatcgacaagctccagcaggtcgcgatccattgcggcgagggctttttcccgatcgcccaacaggaagaccggcacgttttgttggcgctcatgaagcttaccgatcaattgtctgacgttttgatgttcgtccggatgttccatttgatagctgaacatcaggcagtcaatggcttcgttactagagagaatggcaaaaccatcatcaaaggaggtggatttaatcacggtaacattttgctggcttaaagcatctgccagacgctcaacggcgttaccgacccaggtgtcttgatggagaaactcgctttcaacaattaatactttcatcattgcttacccggttatgaaggaatcttcgttgcgggcaagtatcttccggccttttcgggctgtaaagcgcgtgaaaaacaaacatttttgaaatatttagttttataaacaatacgttatgtgattattttaaattattttcactgcttattatcgacggctaaactatttttttggctgatactgatatcgtctttagccgggaaacgtctggcggcgctgttggctaagtttgcggtattgttgcgggctcatgccgacatatttgccgaacgtgctgtaaaaacgactactactacgaaagcctgccgtcagggcaatatcgagaatacttttatcggtatcgctcagtaacgcgcgaacgtggttgatgcgcatcgcggtaatgtactgtttcatcgtcaattgcatgacccgctggaatatccccattgcatagttggcgttaagtttgacgtgctcagccacatcgttgatggtcagcgcctgatcatagttttcggcaataaagcccagcatctggctaacataaaattgcgcatggcggctgacgctgtttttgtgtgtgcggctggttttattgaccagaatcggttcccagccagagaggctaaatcgcttgagcatcaggccaatttcatcaatggcgagctggcgaatttgctcgttcggactgtttaattcctgctgccagcggcgcacttcaaacgggctaagttgctgtgtggccagacttttgatcaccatgccgtgagtgacgtggttaatcaggtctttatccagcggccaggagagaaacagatgcatcggcagattaaaaatcgccatgctctgacaggttccggtatctgttagttggtgcggtgtacaggcccagaacagcgtgatatgaccctgattgatattcactttttcattgttgatcaggtattccacatcgccatcgaaaggcacattcacttcgacctgaccatgccagtggctggtgggcatgatatgcggtgcgcgaaactcaatctccatccgctggtattcgctatacaggctcagcgggctgcgggtctgtttttcgtcgctgctgcacataaacgtatctgtattcatggatggctctctttcctggaatatcagaattatggcaggagtgagggaggatgactgcgagtgggagcacggttttcaccctcttcccagaggggcgaggggactctccgagtatcatgaggccgaaaactctgcttttcaggtaatttattcccataaactcagatttactgctgcttcacgcaggatctgagtttatgggaatgctcaacctggaagccggaggttttctgcagattcgcctgccatgatgaagttattcaagcaagccaggagatctgcatgatgtctgcacccaaaattacatttatcggcgctggtagcacgattttcgttaaaaatattcttggtgatgtgttccatcgcgaggcgctgaaaacggcgcatattgccctgatggacattgaccccacccgcctggaagagagccatattgtggtgcgtaagctgatggatagtgcaggggccagcggcaaaatcacctgccacacccaacagaaagaagccttagaggatgccgattttgtcgtggtggcatttcagattggcggttatgaaccttgcacggtgactgatttcgaggtctgtaagcggcatggtctggaacaaaccattgccgatacgttggggccgggcggtattatgcgcgcgctacgtaccattccgcatctgtggcaaatttgcgaggacatgacggaagtctgccccgatgccaccatgctcaactatgttaacccaatggcgatgaatacctgggcgatgtatgcccgctatccgcatatcaaacaggtcgggctgtgccatagcgtgcagggaacggcggaagagttggcgcgtgacctcaatatcgacccagctacgctgcgttaccgttgcgcaggtatcaaccatatggcgttttacctggagctggagcgcaaaaccgccgacggcagttatgtgaatctctacccggaactgctggcggcttatgaagcagggcaggcaccgaagccgaatattcatggcaatactcgctgccagaatattgtgcgctacgaaatgttcaaaaagctgggctatttcgtcacggaaagcagtgaacattttgctgagtacacaccgtggtttattaagccaggtcgtgaggatttgattgagcgttataaagtaccgctggatgagtacccgaaacgctgcgtcgagcagctggcgaactggcataaagagctggaggagtataaaaaagcctcccggattgatattaaaccgagtcgggaatatgccagcacaatcatgaacgctatctggactggcgagccgagtgtgatttacggcaacgtccgtaacgatggtttgattgataacctgccacaaggatgttgcgtggaagtagcctgtctggttgatgctaatggcattcagccgaccaaagtcggtacgctacctagccatctggccgccctgatgcaaaccaacatcaacgtacagacgctgctgaccgaagctattcttacggaaaatcgcgaccgtgtttaccacgccgcgatgatggacccgcatactgccgccgtgctgggcattgacgaaatatatgctcttgttgacgacctgattgccgcccacggcgactggctgccaggctggttgcaccgttaaaacgcgactaaacgctactgcgccgggggatttattccggcgcacacctctgacgataccaataacagaaggcgggcgttggtaacagcgacccgataccctatgagcatttcaatgactacaaaactcagttatggatttggagcgttcgggaaggattttgcgatcggcattgtgtatatgtacctcatgtattactacaccgatgtcgtcgggctgtctgtgggtttggtcggtactttgtttctggtggcgaggatctgggatgctattaacgatccgattatgggatggattgtaaatgctacgcgaagccgatggggtaagttcaaaccctggatcctgatcggtacgttggcaaactctgtaatcttatttctcctctttagtgcgcatctgtttgaaggtactactcagattgtctttgtttgcgtgacctacatcctctggggcatgacttacaccattatggatattcccttctggagcctggttccaaccatcacgctcgataaacgtgagcgcgaacaactggttccttatccgcgtttttttgccagtctggcaggctttgttacggcaggtgtgacgctaccatttgttaattatgtcggcggtggcgatcggggatttggctttcagatgttcactctggtactgatcgccttttttattgttagtaccatcatcactctgcgcaatgtgcatgaagtctttagcagtgacaatcaaccgtctgctgaaggaagccatctgacacttaaagccatcgttgcgctaatttataaaaacgatcagcttagttgcctcttgggtatggctcttgcttataatgtagccagcaacattattaccggctttgctatctattatttcagttatgttatcggtgatgcggatttgttcccctattatctgagctatgcgggagctgctaacctggtgacgttagtattcttcccacgcttagttaaaagtttatcccgacgcattttatgggccggagcatctattcttccggtgttaagctgtggtgttctcctgttaatggcattaatgagctatcacaacgtcgtcctcattgtgattgcgggtattttgctgaatgtgggaacggcgcttttctgggtattacaggtcatcatggtggcagatatcgttgattacggtgaatataaactgcacgtacgctgtgaaagtatcgcttactccgtgcagactatggtggtgaagggcggtagtgcctttgcggcttttttcattgcggttgtgttagggatgattggctatgtaccgaatgttgaacagtctacgcaagccctattaggtatgcagtttattatgattgctctaccaactctgtttttcatggtaacgctgattctctacttccgtttctatcgcctcaatggtgacacgctgcgcaggatccagatccatctgctggataaatatcgcaaagtaccgcccgagcctgttcatgctgatattccggtcggtgcagtgagtgatgtgaaagcctgacgtggacaatagctaacgaaaatggcctgatgcgatatgtttatcaggccacgtcttaatgtaatgctttggatttgcaaattttgtagaccggataaggaattcacgccgcatccggcatcaacaaagcgcaagttgttatccggttatcaagccaaagcgccgtagctggcggcaatgaaagcgagcgaggaatatcaccgtcgttaatgcgccaagcagcgcgcagaacatatcggattgcgtgtcccactggtcgccctgggtgccgagaaaatcatccgctccctgacccattgccagcgctgcccaccactcgattaattcatacatcgcgcttatcgccagcgccacgcagcagaccaggaacgccaccattttacgtccgcgcacgtacatcccgcgaacgagaatttctcgtgccaccagtgcaggcaccagcccctggaaaaagtgccccagcttgtcatacggattacgactcaaccccagccattcctgcacctcaaaaccaacggggactttcgcgtaggtgtattgtccgccgaccatcaggatgatggcgtgaaggaaaatgagcgtatagagcagcggcgttaacggataacgtctggcggtggcaagcagtagctgcacgacaataatcaccggtgtcacttccatcagccaggtgagtttgtcatgggcgctaatgccggtataaatcaggattaacgttagcgtcagtgcgctggtgttaagaattaacggcttgagtgtgcgggtcatggtgagttcgcaaatcagggaaaatactgactattcaccagcaagcgtgaaattacaatcgcaaaagaggtggccagggggatcacctggcagcatgctgccaggcgctgggccgaagaggttacttagtgcagttcgcgcactgtttgttgacgatttgctggaagaagtcgttacctttgtcatcgaccaggataaacgccgggaaatcttctacttcgattttccagatagcttccatacccagctccggataagcgacgcactccagatgcttgatgctctgctgcgccagtaccgccgccggaccgccgatgctaccgaggtagaagccgccgtgtttatgacacgcgtcggtaacctgctgactgcggttacctttcgccagcatgatcatgctgccgccgtgggattgcagcagatccacgtaggagtccatacggcctgcggtggttgggccaagactaccacttggataaccggcaggggttttcgccggacccgcgtagtagatcgggtgatctttgatgtactgcggaagttctttaccggcgtcaatcagctctttcagcttggcgtgtgcaatatctcggcccacgataatggtgccggtgaggctcaaacgagtggataccgggtattggctaagctgggcgaggatctctttcatcgggcggttaaggtcaactttcaccgcttcgccttcaccggcctggcgcagttcttgtggaatgtactggcctgggttgtgttccagtttttcgatccagataccttcgcggttgattttcgctttaatgttacggtcagcggagcaggagacgcccatgccgaccgggcaggatgcgccgtgacgtggcagacggataacgcgaatgtcgtgcgcgaagtatttaccgccaaactgcgcgccaagaccgagtttctgggcctcttccagcagttcctgttccagctggacatcgcggaacgcctgaccatgttcgttcccttccgtcggcagttcatcgtaatagtgagcgcttgctaacttgacggttttcaggttggtttccgcagacgtaccgccaatcacaaacgcgatatggtacggcgggcaggctgcagtaccgagggtacgcattttctcgacgaggaagtttttcagtttgccgggagtcagcagggctttggtttcctggtagagatacgttttgttggcagagccgccgcctttcgcaacgcaaaggaatttgtactcatcgccatctaccgcgtacaggtcgatttgcgcaggcaggttagtgccggtgttgacctctttgtacatgtccagcgccgcattctgactatagcgcaggttatcttcgatataggtgttatagacgcctttgctcagcgtttcttcatcaccgccgccggtccacacgcgctggccttttttaccgacgatgatcgcggtgccggtatcctggcaggtcggcagcacgcctttggcggcgatttcggagtttcttaagaattgcagcgccacgtacttgtcgttttcgctggcttctggatcgtgaagaatagccgcaacctgtttctggtgtgccgggcggagcataaaagaagcgtcgtgaaaggcttgctgcgccagcagggtcagggcttctggttccactttcaggatggtttcgccgtcgaagtcggcaacgctaacgtaatcggaagtgagtagatagtattcggtattgtctttccccatcgggaaaggtgcctggtagataaagggtttgttactcatagcttccagcctgtaactctgtatttgttattcgaaaatggcgtgccgcgtagtcacgggcggcacgcaaagtgcatttataagaacccgtacatcgcggcgaagatccagccgaagacgcagcttacgctcacaccaatcaaccccggcagaataaagctgtggttgatgacgaagcgaccgatgtgggtggtgccggaacggtcaaactgaatcgctgccagatcgctcggataagtcggcaggatgtaataaccgtagcaagccggtgcactagccacgatgtatgccggatcaacgccgatcgccagcgcgaccggaacaatcgccgccagcgccgcagcctgagagtttacaaacttggaaaccagcagcagaacaatggcataggcccacggatactctttcaccatttcacccagtacgccctgaatttcagacatatgcgcaccgaacatggtttctgccatccatgcgataccgtacaccgccacgatggcgatcataccggaacggaagacttcgtttttactgatagacgcgggattggttttggtcaggataataatcagcgccccggtcagcagcataaacatctgaataaccagtaccatgctcagcggtttgccgccgaaggatggacgcaggtcgctatcagcaccaagaagggcgactacagcgattgccccgaggaaaatccacattgccagccagttgcttttcggcagttttttatccagcagcgtcgcggtatcaccgtaaacatactcacggttttccggtacggagatgaatttctggaactcttcgtctttatccagatctttaccgcggaaccagctgaagataccgatcgccaggataccgattaacgtgcttggaatggtgattgccagcagatcgaggaactcaagatggcgaccatcaaaggtgacattacccagcatcgcaaccagagacacgaccgcaacgctcaccggactggcgataatccccatctgtgcaccgatagaacttgccgccatcggacgttccggacggatgttgttcttaatggcgacgtcgtagatgatcggcagaatggtgtaaaccacatgacccgtaccgcaaagaatggtcagtgtacaggtcacaaacggcgcgacaatactgacatatttcgggttgcggcgcagcagcttctcggcaatttgcagcatgacatcaagaccgccgctagcttgcaaggtcgcgcttgccgccaccaccgcaatgataaccagcatgacatcaactggtggtttacctggctgaaggtggaagacgaagaccagaatgaccagaccgataccgcctaataaacccagcgcgataccaccctttctggcaccataaaacagacatatcagtattatgataagttggatagtaaataacatgtgtgaaccctcgcgataatcctatttaaatttttgctgaatagatcacagtcacgttctgttttgtatgaactgttttcagagcctgactaaatatccgtttggtcgttaccggctttagcaaatacctcacagtgaatattggctgattaaagcagcggcaaatttatgcactgtgataagcggctttttcagagagaaagactctctggcgatgggtttatagtttgtactgcgcagatgttaatgttttgtttgctgttatcttattgatatttatcggtctattttttgttctcagggcagatgtcattaggtttatagattaatctgatctacccatttgtgggtaaaaatacacataatgcgggtgacataatagttaattaacttttgttagcgttttgaaattaaaaacaccgttcacctgaagagatattaatttttagcgatgatggagggataattatatttgatctggcacaagttttactgatgaaggatgtaacttgtgccaggggtattttgcattacggtaataattattacttacagataaccagcgatccgttattggcaatattgtttcagtagactgtagtgttctgcctgaatacggtaacggtaaactggacgccccgtgacgccataatggatactggtgaacaagatgtggcagttgaccagccagatgaggtatttacggcaggaaacacggctaatgttaacctcgttggctagctcgtcggtactaaattcatagtcctggtgcgcgtcaatccactggcacagtgtgcgtaacgtctgcggcgttaagccttttggcaagcgacgaggatcctgttcgttggagctgctgccgtggattagctgatcaagctcggcctggtcataatactgatgtttttccagcgccattttcttttgccgccagccggtgagcgcctcttcaaagcgggaagcctggaagggtttgatcaggtaatccacgacaccgtaatgcaggctatctttaatggttgccgcatcggctgcggaggagatgacaatcacatcacttttgcaacgcgcgttatgcaggacaggcagtaaatcgagcccgttctctttttgcatatagatatcgagcaatatcaggtcgataggcgtatcgctattgaagataatctctttggctttctccagcgtgctggctgttccacagcattgaaagcctgggatttgtgctacgtatcggcgattcagctccgcgaccattgcgtcgtcatcgataattaatacattgatcatctgttgctcctctccccgtcccagggtatctggacaaaaaattgtgtgaaaatcccgggttcgctttccacggcgatgctgccgccgagattttctacctgttgtttgacaagtgctaaaccgacgcctcgctcgcttccttttgtgctgacacctttgtcaaaaatgtgatcgattttatcgggtgcgatccccggtccatcatcattaacttcacagtgcagccagccgtgacggtagtgcaatgttacgctaatttcgcctccgggttccggccctaatgcctccagcgcgttttctatcagatttcccaacgtggtaatcagcgtcgcgacctggtcctcactgccgctgtctggcagctggctttcactgtttaaaatcagcgtatggcctaaatcggtcgcgcggttaatcttgctgattaaaaaaccagcgataaccggagatttgatcttacccagcagagagccaatctcttcctgatagttattggctgttttgagaatgtaatcttccaactgcttataactcttcagatgcaataatccgagaatcacatgcaatttattcataaattcgtgggatcgttcacgaagtgcgtcagcatagttgaccagaccgtcgagtcgctgcatcagtttacgtacttcagttttgtccctgaaggtactaatggcaccgatgataacgccattactgcgcaccggaacggtgttgatcagtaatagccggtctttaatcgtaatctcttcgtcgcggcgcggggtaccgtcgcgtaacacttcgctgacatctaccacctgactccaactgtggcttagcgtgctcagtttctcatcgtcctggctcttacggtaattcagcaattcttgtgcggcatcgttgatcagcgtgacctcgccgcgatcgtccacggcaacgacgccttctttgatagactgcaacatggcctggcgttgctcaaacagcgtggagatttcgtagggttccaggccgaaaaggatttttttcagtaccttaaccagaatgcaggtgccaatcagtccgaccagcatgccaaataatacgctccagataatgctccagcgactgtcattgatctgttgggtcacacggcttaactcaaggccgatcgccaccacgccaatttgtttatgattttcatcgtagatgggggtaaatacgcgtaaagcctgcgccagaaaaccgcgattgatagcgacattttcttcgccattcagcgctttaaggatgtcatcacctttaaatggctgaccaatacgctgggcttcaggatggctgtagcgaagactttgcatatcggtaacgacaataaacagcagatcgttgcgtttgcgtacggcttccgcgatggcctggatgccactctcctgcggttttttctgcaagccctgacggatttccgggctgtcggcgagggtacgcgccactgccagtgccttgttggctagcccatctcgcgtcatatcactgatttggctgaagtaaatcagatgcaccaccaatagcacgctgaacagtaccgcactgaccattaagatcactgtggtactcaatttcatcggacgtttgcgtaacatgcggtagggcaaactatgtctcatcagcttccttgtgtgacaaatttcttaagcattatctctgatgaggcgggtaattcaaagggagtaagaatgattggctatataggggaagagactctggcaacggaaactgccagtgctgtatgaagattccggggctatgcttatagcgataatcatactgatgagagagggaaggtcatggatcaggcgctactggacgggggttatcgctgttataccggcgaaaagatcgatgtctatttcaacactgcgatatgtcagcattctggcaattgcgtacgtggcaacggcaagttatttaatctcaaacgaaagccgtggatcatgccggatgaagtcgacgtcgccactgtggttaaagtgattgatacgtgcccgagcggcgcgctgaaataccgtcataaataagcgagggtaaaatggaaatacgcgaaggccacaataaattttacattaatgacaaacaaggcaagcaaatcgctgaaattgtctttgtgccgaccggagagaatttagcgattatcgaacataccgatgtcgatgaaagcctgaaagggcaagggattggtaaacagctggttgcgaaagtcgtggaaaaaatgcgtcgggaaaaacgaaaaattatcccattatgcccatttgcgaaacatgaatttgataaaacgcgggagtatgatgatattcgcagttgatgggagagtacagagtcacgatatttttcattctctccgcgatgtgatgcaggagagcatctgaagggtagggggatgcacaaagaatgggcagagagcgcgtttttttgtcccaagtcatcccctttactgagcaaaaaaaagaatatctcctatatgagaatcatcaatcggggttaataagttttgcgtccccagagcgtttaatattgataggagtcatattatggaaggtaaaaacaagttcaatacttatgttgtttcttttgattatccaagttcttattccagtgtgttcttaagattaagaagtttgatgtatgatatgaatttctcctctatcgtggctgatgaatatgggataccacgacaattgaatgaaaactccttcgcaataacgacaagcttagccgcaagtgaaatcgaagatttaatcaggctcaaatgcttagacttaccggatattgattttgacctcaacattatgacagttgatgactatttccgtcagttttacaagtaaccaggaaggataagaagaacataaaaaatggcactattctctaaaatattaattttttatgtgattggtgtgaacatatcctttgtcattatctggtttatcagtcatgagaaaacacatattcgtttacttagtgcattcctggtcggaataacctggccaatgagtctgcctgtggcattacttttttctctcttttaagagctgtagttgagtggacccgctggttatcgtgaaacgaagcgtctctcctcaaaactggatttgcggaacgatgaacgaagcagtcgcctgactgcttcgttcattaaagtgaaatttatttctgtgggcgcatcgccgggaagagaataacgtcgcgaatagtatggctgttagtaaacagcataatcattcggtcgataccaatacccagaccagcggttggcggcagaccatattccagcgcagtcacgtaatcttcgtcatagaacatggcttcgtcgtcacctgcagctttagcattaacctgttcctggaaacgttcagcctgatcttctgcgtcgtttaattcgctaaaaccattaccgatttcacgaccaccgatgaagaattcaaaacggtcggtgatttccgggttaacatcattacggcgtgccagcggggacacttctgccggatattccgtaataaaggttggctgaatcagatgtgcttctgccacttcatcaaagatctctgtgacaatacgtcccaacccccagcttttctctaccgtaataccgatagattcagctaatgctttagcagcatcaaaattatccaggtcggccatatcggtttctggacgatattttttgattgcttcgcgcatggtgagtttttcaaacggtttgccgaaatcaaacacatgctcgccataagtgactttagtggtacccagaacctcttgtgccagggtgcggaacagactctctgtcagttcaatcaaatcgtggtaatccgcatacgccatgtagagttccatcattgtgaactcaggattatggcgaacagaaataccttcattacggaagttacggttgatttcgaatacccgttcaaaaccgcctacaaccagacgtttcagatacagctccggcgcgatacgcagatacatatctaaatccagagcattatgatgggtaataaacgggcgagcagatgccccacctggaattacctgcatcatcggggtttctacttccataaagccgcgcgcgaccatgaattgacggatagcggccagaattttactacggacaacaaacgtttgacgggatttatcgttagcgatgaggtccagataacgttgacgataacggacttcctgatcctgcagaccatggaatttatctggtaaaggacgtagtgctttagtcagcaggcgcagctcagtacagtgaatggaaagctcacccgtttgcgtcttaaacagcgtaccgcgggcaccgataatgtcacccagatcccattttttaaactgatcgttataaacaccttctggcaggctatctcttgcaacgtacagttgaatacggccaccgacatcctgcaacgttacaaaggaggctttccccatgatacgacgggtcatcattcggccagcaacgctgacttcaatgtttaaggattccagttcctggttatccttcgcatcaaactcttcgtgcaactggtcagaggtatggtcgcggcgaaaatcattgggaaacgccacaccttgctgacgtagtgccgccagtttttcgcggcgatttctcagttcatcgttaaaatcaatagcctcattggctccccgtgtttcttgttcagacattttggttcctctaaatccagctttcaatttagcgtagataaagagacagatcggtacactgtattatctgcctcgactattagtaactcagtttatcttatcgaaactaacgcttacctcaagttgatatcactaataaataaccatcaaaatggtttaaatgacttattaatctcgatttgttagtgttataaactaaaagttaatttattcataaccaattgtttttacgacagttaatcgttgctctcctgtatcatattcgtcggcgtgctaaacagaaaacgggtagcaaaggccaatacgacgatgatcgcgacacaagccaacgtccactctcccatctgagaaaagaatcgctggtaagctgcaattgccataccgctaatttggctctctgtcgtctgctgtgccacgacgcctgccagccagttggcgaccgcgcctgttgccagcatataaatcccggttaatacgccagacattttcagacgcgtgatttgcgcaatcgccaccgggtcaataaagagttcggcaaagcccattagcgccagcccggatatcatcacgcccatactcgcttgaccgtcagccgctgcatgtcgggcatcaaatgccaacaacataaagccacaagccatcagcagtaagccaaaggcaaacttcagccagacgcgcaatgtactgttgccgcggctttctgggctcgccagccaggccagtacaaccccagcgagcatcaccgcaattgcattcacgctctggaatagtgctgtaggtacttcaatattgaatgcctgacgattcacaaagcgatcgataaacaagctgatggtactgccgccctgttgtgccagtacccagaacaatgtcccgacaaacatcaacaatacaatttgccaaagagcacggcgatgttcggggaatttgatcatcatgcgggcaatgatttgtgcggcaatgaggcaaacgatcgccagcaaatatccggaccagtcgttctccagcagcagagtaaaaaatactggggctaaacagagcatcaccactaaccagctccatactggtaaggcaaatttgacactagtgagcgcttttttatccatactacgtgtggactggaaatgacgatgaccgcttaagaaaatcaacaaaccgataaacatgccgccacccgcaagggcaaagccaacatgccatccataccactgagcagccaggccgcaggcgattggggctgcgatagaaccgatattgcccgcagcatacagcaggctaaaaccgccatcacgtcgatgatcgttctcgtcgtagagctcgccaagcaaacagctgatgttacttttgaataaaccgtagccacaaataatgattgccagcgccagatacaggctaaaggtactatttgtatcaatacccagcaccacatggccaagggtcattaacagcgcgccggcaatcactgcagtgcggttgccgagcaggcggtcggcaagccagccgccgagaataggggtaacgtaaaccagagaagcatatgcgctgaacaggctgatggcatggttatcatcaaaaccaagctgatgggtgagatagagaatgagtaaggcacgcatgccgtaaaaactgaagtactcccagatttggatcgccacgatatagtatatcgcgcgcggctgactgggtgttttcatgtgttctccttatgagcaaaaaagggaagtggcaagccacttcccttgtacgagctaattattttttgctttcttctttcaataccttaacggtatagcggccatcagcctgacggtatgcaccgtgaatatcggtttcaaagcccggatagtgagcgccgatttcacacagcatctgcaggaactccagaaccggacgactttcttcggtgatcatttcacccggcattaccagaggaactcccggcgggtacggaaggatcatattggcgttaatacgacctaccatttcgtcgaggtaaacttcttcggtcataccgtgcagctctttctggaatgcagcatacggagtcattaccatcgtcggcagcacttcaaatgcgcgatacatcagatccggcagattgtggtgaacaatcagtttgtggatattctgagccagttcctgaatacgcatgttttcatagaattcaggatcttcacgatacagagacggcagcatgtttttcacacgcaggttcaggtcgaacgcacgtttaaagtcagtcagagcacgcagcaggctcagtgctttggtcttatcgataccgatgctgaacaggaacagcaggttatacggaccggttttctcaacaacgatgccatgttcgtcgaggtatttcgccacgatgctggccggaataccaaagtcgctcatggtgccgtctttttccatccccggagtcagcagggtgactttgatcgggtcaagatacatgtgctcgttatcgatgtttttgaagccgtgccaggtgctgtcagaacgcagcggccagcattcagtcgtatcgatatgatccggctgccatacatcaaagaaccagccatcagattccgttctcagacgtttgatctctttacggaatttgatcgcacgttcaatagaaccgttgatcagacgcttacctgcattgcctttcatcatcgccgcagcggtttcagtggacgccacgataccgtagtgcggagaagtggtggtgtgcatcatgtaggcttcgttaaaggtttcttcgtttacgtcacctttaacgtggatcatggaagcctgagagaacgccgccagcagtttgtgagtggactgggtttcgtaaatcactttcccttctacacggccaccgctcataccgcatttaccttcgtaaatcggactgaagttggtgtaaggcacccacgcggagtcaaagtggatggatttcacatccagtgttttcttgatgaagtcggtgttgtacagcagaccatcataggtagagttggtaattacagcatgtaccggccaggttgcgtttggtgtttctttcacgcgcttagcaatggtagcgtgctggaattcactctgtgggataccaccaagaataccgtaagcgttacgggtcgggcggaaatagattggcgtaacatcgctcatcatcatcaggtgggtcaggcttttgtggcagttacggtcaatcagaatggtgctgcctgctggagcagagtacataccaacaattttgttcgcagtggaagtaccgttggtcaccatgtagctgcggtctgcgttaaagacgcgagcgatatactgttctgcttctttgtgtggaccactgtgatccagcagagaacccagttcagatacactaatggaaatatcagatttcatggtattcggaccaaagaaatcatagaacaggctacctaccgggcttttctggaatgcagtaccgcccatgtgaccaggagtacagaaagtatatttaccttcacgaacatatttaaacagtgctttagtcagcggaggcagaatagtgttgatatattcgtcagtggtctgcttgatcttattagcaatatcttcagcagcacccagcgcatattcaaagaagctaatctgtaaacgcaggtcattcaggcttacatcgagagtggaatacgtattagcgaacgcgtacaacggcaggttctcgttcattttgctaatttcttcgcacagctcgagattatatttatcccagtcaaaaataacgccgcacagacgcgcattgttttcgatcagttttaataagtcgtcacggtcgttcgggtaaacaatctggaagttcagacgttcaagcgcgcgatgaagttcacggatgggttcttctttaaaataaacccccatgtgattcaatattgcaataacgttcatagtcatatctccaggtaaaaaaggcccctcccaacacatgggacaaaatgaaaggaggagcctcggaaaatacttttaattaatgtgcgttagacgcggtgtggttatccatactgtggctctggcgctcgtgcattttgcgagcgtagaacatcaggataatcaggctgacgatgaaggtacctgccagctcgaaggagcttgcgcccatcagcgcgatgaagcagaacacgcaacccagtacagagcagatcaggctgacaaagttgcggatgttaacgccttcaaaacgaatcaggtcaacgcaagagtagaaatacggcagcatagtcagcagtactgcgataccggtcagttcaccgaacaggtcagatgctttaccaccggcagagttcatcagagtgataaggatcatcagggcagtcattttcactgcagccagcagcagaccttttttcggaataccgttgctgtcgacttcaccataaactttcgggaagttaccgtcgttagcggcacgtacacctgcctggcctaccaacatcatccaggagcccagagaagtcaggcacgcaaaggcggtgaatgcagaaaccagcggcgcagcccagttaccgaggatagtactagcactgattgcaaacggagcaccggaagccgccattacagaagacggatacataccggaaagcacctgagtcgcagcgatgtaaacaatacctgctaaaccagtacccagcatggttgccagcggaacggtacgtttcgggtttttaaccataccagtacttacagctgcggattcaacacccacgaaggcccacaggcagagcagaatacttttaatgatcgcatgaccatcagtggtatccgcagtattccagttagctgcataagttgccgcatcaaaccaatgccagccaacaatagcagtcatcaccacaggaataagaaccagcaccagaccaatagtggttaaacggcttacccaagtaccgccgagcatatttacaaaggtaaatacccagacgatagcaatacaggcgatacccgccggaacaggatcatttaatactgggaagaaggtggaaagataagatacagcggtaataccaatcgccaggttaccaatccagttagcatggtaataaagaacacctgtctgaaaaccaaatgcaggggaaatttctccggcataagcaattgggccaccttgttgcgggttttttgttgccagtcgggcatatacatacgccaggctcattgcaccaataatagagataatccaaccccagatagcaataccaccgatacttgctaggttcgcaggtaataatgcaataccgctccccatcatattaccggcaacaacaccggtacaggcaaatagcccgatcttcttggcagaactcatgctcttctcctaatttcatttttgaatttggagtccgggtcatgatgtataactatttcctgaccagaccaaactggcgataagattactcacgaaaaaaggattaatcctaaagattaggtgaaataacacaaaagtttctgtaagtgagaacttgaggttttttattaacacatcaggatcgcaagttgatatcatgaaaagataaacatttaatgtttacaatggattgcgtgacattctctggttaaatttatgtaataaaaattatgcggcaaataaattgccgcaacatattataccaacaggaacatacaaaaactcaacaacaaatatttccgagcataaatcaacccggagttacttattcactagcaagaaatttgtcgagataaggtacaacataaggaacagaagtctggaatataccattttcaatccagtaaagggtgtttgcccctgggcgtaaattaaaggcggtgagatatgcatcagctgcttcccggttcatccccttcatttcataaaccttgccaagcaacacataatttagccaggacatttcaagatcaatgccagtatttatcgcctggtaagactcatctgttttaccttttaccagagcactgaccgcttttatttgatatataatggacaggttgttcaattccggcagtgtaacaatgttatctatttctgtgttcagtgctgctaattgtttttcatctaaaggatgttgagaatggcgcacgatatcaactaatgctttttctgctctcgcgtaggtaaattctggggaactttgaacaatctcacctaataattcactggcacggttcaaacttttatcatcgccatgcagtaaataatcatgtgcctgataaaaattagttaataacgcaccacgatgcggcaaaattttctggagcgtctcctgcattcgttgtggccacggttggtttaacgctttacttaaactctccagtaaatcattttgaatcgccagctgattaccgttagtgatgacataacgtttatccagcatggtactaccatctgcattgtctaccaattttatgctcataaagcattgttgagcacggtattggcgctgattaacaaacgcaatagataatgttttaccggaactgctcggttcatcaatgttgtagttgattttgtcatgcaccataaaggtggagaaggtgttaagacttgtcgccaccaaatcacccacgcctatcgcgtaagagagctgatacggggaactccagctgttacaacttttatttaccatattaatgtcaatatcgcgtggattgagcaaaatacggcttttgctcataggaagacgtgtatcaagactactaaacgctaccagtgctacacagatacctaagctcaacaggaaaaaaaaccatacccaaaaggtagtgaatcgtttgcttttaactggggattgttcaggtggcgttgcggtgttttgaatgttaagactgtgggagggagaatctgtggcaggaaccgcctctggtatagggggagggctagatagcattatttcctctccctcttcttcgctgtaccagataaccggcaccattaatttatagccgcgctttggtacagtagcgatatagacaggactatcttcatcattatcttttaaactcttacgtagttcactgatactctgcgtcacaacgtgattggtgacaatacttctcttccagacattatcgataagttcatccctgctaagtacttcgccactgtgttgagcaaagaaaaccagaagatcgattaatctcggctcaagggtaagttgacgcccattgcggctaatttggtttatggacggagtaacaagccattcgccaacgcgaactacaggttgttgcataatagaaactcattcgaaaagggaatgatgcaatgataattgccacaacctatttttaccatctatagatgggtttatttacatattattggtgaatgcaagacgttatttttaccagccataaacttcttgattacatagtattacgaaaggattttactgagaaccagaagtaatattccttaccatcaaaattcatcatctttgccaaagaaaaatgttcagaaaataatccatggaaaattgtccggagcacttactattttaatggattgttagtctttgcatgagcaagcgaactgatacatttctctttgttctcattcagaaaatctcatcagtcgccgttcagaccggtgttgtgctttatggatgcgttacgctcctgatgacgtcatttgacgttcaacagcatcacggggccgcacgacatttcacgtcagttagtgctatagctcaggaacaaattttcccgaattgggatatgcccgcaaattgctggtgatgtggggagaatctggttgagttcggtagaattgatttggaggcagaacgcttaaatcgtggcgtcctgaaacgaaaaacggacctccgtggaggtccgtttatatgaatttggtgcccggactcggaatcgaaccaaggacacggggattttcaatcccctgctctaccgactgagctatccgggcaacggggcgcattaaaccgtaatctgcacatctcgtcaacctaatttcagtaaaagcgattcaactgcttaagattgcggcaaatcgcttcttttctgtgtttctgtcaggtcaatgcaccaccctggcggcagcgggcgaagcgcaggatatcttccgccagccgatgtgcagtgtcgacatccgcctggctacgattcaccagcattcggcttaaacagccttccagcaccagttccatctgctttgctaccatcgccggatcgtcaacttccagtgtggttaacagttcgtgggtgaaatcgtaggccgcgcttttttgctgatcggccagttgatgaatagggtggccaggatcgggataaaacgtacaggcagcgataaatagacagcccggatagcggttgtttttaacgcactcgcttaacgcctgataacgtgccagcagcttttgttcggcggtttgcgtttcgtccagcatcagctgacgacgccagacatctatctgttggctaagataacgcagcgcatcgtagaggattgcctctttgtctggccagaagcggcgtagctcgtccagtggataatccacacgttcagcaaccatctccagcgtggtgttggcaatcccttgtaattctaataatttcagggcttctcccagtacatcttcacgttgcacgctattttcctccgtctttcccactgcaagtgtcgttcacggttggcgatcgcgcaaatgtgcgctgaaggtttcagcatccataaagcccgtgacgcgtgcttgtggatgctcctggccttgtccgtcaaaaaagagaattgtcggtaggccaaggacattaagatgctttaacagcgccacatcttgtgcgtcgttggccgtgacgttggcctgaagtaagaccgtgtctgctaacgctttttgcacctgcgggtcgctgaaggtgtatttctcaaactctttacaggcgacgcaccagtcggcataaagatctaacatcaccggtttgcctttggcttcaacgagcgcctgatttaactcatctaccgttttgatttgtgtaaagttgagatgcgtctgagtttgcgcggtatgcgtcgcaccaaatgcccaatcctgaagtgggcgcacgctaaccaatgccgctgccagcagaataatttgcacaatacgcatccagccgcgtttagcctgtaggctggtgataaaggcccagccaaagaatgcgacacccagcgcgctccacaagcgtaatccccatacatcaccaatcactcgctccagcaggaagaccggcagtgcgaggatcacaaaaccaaacgcggttttgacttgttccatccacgggccgcttttcggcagcaagcggttaccaaagacggtaattagcatcagcggcaggcccatgcccaacgcatagagataaagcgtgccgccgcccagccacatgttcccgctttgggcgatatacagcagaatcgcgctaagcggtgcggtggtgcatggactacagatcagtccggcaatcgcccccataacaaacacaccgccaggactgccgccctgttggcgattgctcatcaacgtgagacgtgtttgcaggctagaggggagttgcagggtaaacaagccaaacatactcatcgccagcaaggtaaagacgatggcgaggccaatgagcacgtatgggtgctgtagcgccgcctggaactgtaaccctgcggcggcaaccaccagacccagcgccgtgtaggtcagcgccatcccctgcacataaataaaggtcagcaacaatgctctggcagtggagagccgctgtttaccacccagcacgatgccagaaatcagtgggtacattggcagcacgcatggcgtaaaggcgataccaataccgatcaacaacgcccagagcgcggaaaagggcaattgcgcggtgggctgctcttgctgcggaacagacacaggctgtggcgctgcgttgttggcgaccacttcgcttaacggaacggttttggtttctggcggataacagaaaccggcatcagcacagccctggtaggtgacagttaacgtcgctcccgcactcgcctggttgatggtgacgggaagcgtcagccgatcgcggtaaatctcgcttttgccgtaaaactcatcttcatgccagacgccttgcggcagctgcacgtcggcaattttcgcgtgttccggcgtaatgcggatctgtttacggtagaggtagtaaccgtctttgatctgccaggtcagattaaggtcatgttggttttgctgaaaatcaaaagcaaaggcttgatccgcggggacaaattgactacgtcccggcgcgtcgaataatccggcaaaaacggaagtgctgcaaagtagcaggatcagcgtaaagatgcgttgagccatgagaggtaatctgtgtctccttatgtcagcgtaaagatgcgttgagccaactgaggtaatctgtgtctccgtgtgtaacaggtaaaaccagaagttccggggtttgatatggatgatgagacttcaggcattccagcagtgcctgctggtgagatacggtagtttttaaaatcatctgcacttcgtattcttgctccagcttaccttcccagtaatagagagaggtagcgccggggatcaaggtcgcgcaggccgccagtttttccgccagcactttggcggctaaatcctgggctgtcgcttcatctggtgccgtacatagcaccacgacagacgcggtattgctacttttttcatcaagcataaacacctcgcaagaacagatggaaccgcaagagagaggtcactatacaacggacgggggaaggatgttagtcggcgggaaagaaagcggggcgtgaacgccccgcgattgatcattacagcatgaagctacccagcacgaagccgaagcaaacggccagggcaacacccagagtacccgggatgaagaacggatggttgaagacgaatttaccgatacgggtagtacccgtgtcatccatctgtaccgcagcaaccagcgtcgggtaggtcggcagaatgaacagaccagacaccgcagcgaaagaagcaacagcggtcagcggactaacgttcagtgccagagccatcggcatcagtgcttttgcggttgcagcctgagagtacagcagagcagaagcaaagaagaagatgacggccagcagccacggatgaccctgaatcacttcaccagcggtatctttgatccagtcgatgttgttggaaacgaaagtatcgcccagccacgcaacacccaggatacaaatacaggcgctcatacctgctttgaaggtgctggagttgaggatgttgtcggtatcgactttacagataacggtggtcagagttgcaacgctgagcatgatgatcaggattgcgttggtggtgttcatcagcggtttttcaaccagacccatgcttgggctgttgatgattgcatagataaccacgccaactacgcccagcaggaacagccagacggacgtttttgcaccggatttgatttcaatctgcttttcaccgcgcagttcaaccaggccctcttccagacgcttgcgataaatcggatcgtcagagagtttggagttgaacagcatagtgaccaggaaggacatcaccagaaccgccagcagggtggacgggatgaccacggagagcagatggaggtagctgatgccatgaccttccatcacggaagacatgtaaaccactgccgcactgattgggcttgcggtgatcgcaatctgcgcggataccactgcagtagacagcggacggcaaggtttaacgccttgttccttcgcaacttcagcgataactggcagtgtcgccagagagatgttgccagtaccagcaaagatagtcaggaaataggtcacgatcggtgcgaggatcgtgatgtatttcgggttacggcgcagcagcttttctgtctgatgaaccagatagtccagaccgccagcaacctgcatggcagaaatagcggcgataaccgccatgataatggagatgacatcgaacgggatgttaccgggtttaacgccaatagcggcaagaaccagcacccccaatccgcctgcaaaaccaatacctattccccccaatctggcgcccaagaagatcgccagcaaaactatgatgagttctacaactagcatattagccttccttgttttttaacaagttgatattagattgttatttttaagttactgctcacaagaaaaaaggcacgtcatctgacgtgccttttttatttgtactaccctgtacgattactgttcgctttcatcagtatagcgttttgctttgtaagccgggtgcatcagattctgtacggagaaaatatcgtcaagttccgcttcagtcaacagaccgcgttccagaacgacttcacgtacactcttaccggtttcggcacagattttacccacgatgtcaccgttgtggtgaccgatgaacgggttcaggtaagtaacgataccgatagagttgtaaacgtaaccttcgcacacttctttgttagcagtgatgccgttaatgcatttttccagcaggttgtagcaagcgttggtcagaatgtgaacggattcgaacatggcctggccaatgaccggctccataacgttcaactgcagctgacctgcttctgctgccatggtaacagtggtgtcgttaccgatgactttgaagcatacctggttaaccacttccggaacaaccgggtttactttagctggcatgatggaagagcccgcctgcagttccggcaggttgatctcgttcaggccggcacgtgggccactagagagcaagcgcaggtcgttacagattttggacatcttcacagccaggcgtttcagcgcgccgtgaaccataacataagcgccgcagtcagaggtcgcttcgatcaggtcttcagccggtacgcatgggaagccagtaacttcagccagttttttcactgccagcggagagtactctttcggcgtgttcagaccagtaccgattgctgttgcaccaaggttaacttccagcagcagttcagcggtacgttggatgtttttcacttcttctttcagcaggatgctgaaagcgcggaattcctgaccgagggtcatcggtactgcgtcctgcagctgggtacgacccattttcaggatgtcctggaattcgacagctttacgttcaaagccttcacgcagttggttaatcgcatctaccagcttaatcagggaagagtaaactgcgatacggaaaccggtcgggtaggcgtcgttagtggactgacatttgttaacatggtcgttcgggttcaggtactgatattcacctttttggtgacccatcagttccagaccgatattggccagcacttcgttggtgttcatgtttacggaagtacctgcgccgccctggtagacgtctaccgggaactgatccatgcattttccgttgttcaggacttcatcacatgcggcaatggtggcattcgctacacttttaggaatggtttgcagctctttgtttgccatagctgcggcttttttaaccattaccataccgcgaacaaattcaggaatatcactgattttgttgttgctgatatagaagttttcaatcgctctcagagtgtgaacaccatagtaggcatcagctggaacttccctggtacccaacagatcttcttcgatacgaatgttgttactcatgtgaaccttctttttcaagctgccaatgatttgctttaaacacacagaatatatgtggtttcgaatgtttttcgaccgacgattatcccctgcatcgaccgaatacccgagatcatatgctgcttgaggatttctaccgtaatctggatcactttaagtgtcggtttttaccccttaattattaatttgtgaaatagatcaccgctttgggattactaccaaaaatagttgcgcaaacatcttgaaattttgctaatgaccacaatataagctaaacgcgattcgcaacccattcaggtagccggggttaaccggctgctattacaggagaaacctttgcgctggttaccttttattgccattttcctttatgtctatattgagattagtatctttattcaggttgcccatgtattgggggtattgctgaccctcgtgctggttatattcacgagtgttatcggtatgagtctggtacgtaaccagggctttaagaatttcgtgctgatgcagcaaaaaatggcggcgggtgaaaacccagcggcggagatgattaaaagtgttagcctgatcattgctggtttgctgcttttattaccgggcttttttaccgacttcctcggtcttctacttttattgccgccggtgcaaaagcatctgacagtgaagttgatgccgcatttgcgcttttctcgcatgcctggcggcggttttagcgccgggaccggtggcggtaatacttttgatggtgagtaccagcgaaaggatgatgagcgcgaccgccttgatcataaagacgatcgccaggattaatgtcgaaacgccggattatgtggttatgccattttccggcgtttttcgttttggcagcaacagccataaccccgccagcatgatcagcgcatagagacttttccagccgaccattgccagtaacagaacgcataacagcccgccaaccaccgccagtagtcgataacgtccttgcaataatttacagcctgccagcatgcataacagataaatcataataaagatgccattggcataaataataagagcgtccagattgatctctaaagcatgaatcaccaaagtgctcaccacacagcagccgagcaccgcattgagggcattattcgggatatggcgagaagagaggcgtgccaggtagtggtcaggattatgttgcgcctggctccagaccaggcgggcgaagctctgtatataaatgttgagactggcaaagcaggccagatagccaatcacgcaggcaatccataacgctcctacaccgaacaactgcactacaatttttggaaggcttgctgccgccgccattttttcaccataggcgtcgaagtgtaagacgactaccgtacagccccagtagactaatcctgccagcagcagaccaatcatcaaagcacgaggaaaatcacgctctggatttttaaattcgctggcgagatgggcaaatgcctccagaccgacaaaacaccagaacatcacacttaacgcagcaaataacccggtaagttcgatattaccaggtgccggaaaggggatattcgcaggtttgatatcgcccgcccaccagatagcgacaatcagcgcgacgataagtccggcaataacggtttgtagattagcactggaactggcaccgcgagtaccgatataccacaccagcgccagcgtaccgagttctgccaacaacagttgccagctatgccagccaaacatcgcctggccgaacccggcggcaatttgtagtgcggcaggcaaacccacgggaatgacgcttaaaaacagccagccggtgactcgctcaagccggctaccaaacgccataccgacgaagtgcgcgacgccgcctgcgctgggatagtggcgacccagaatcgcaaacacaatcgcaatcgggaacactaagataatcaaaacgggccacgcccacaggctgttattgcccgctaccagcgcagctaacgcaggaacggcaaacacgccagtgcctaataaactcgtgcttagcaggccaatgccctgggccagccccagttcttgtttgagtccactcatgggttgatgtccgattgcgcccaaattttgggcaactgcgtagattttcgatggtagcacaatcagattcgcttatgacggcgatgaagaaattgcgatgaaatgtgaggtgaatcagggttttcacccgattttgtgctgatcagaattttttttctttttcccccttgaaggggcgaagcctcatccccatttctctggtcaccagccgggaaaccacgtaagctccggcgtcacccataacagatacggactttctcaaaggagagttatcaatgaatattcgtccattgcatgatcgcgtgatcgtcaagcgtaaagaagttgaaactaaatctgctggcggcatcgttctgaccggctctgcagcggctaaatccacccgcggcgaagtgctggctgtcggcaatggccgtatccttgaaaatggcgaagtgaagccgctggatgtgaaagttggcgacatcgttattttcaacgatggctacggtgtgaaatctgagaagatcgacaatgaagaagtgttgatcatgtccgaaagcgacattctggcaattgttgaagcgtaatccgcgcacgacactgaacatacgaatttaaggaataaagataatggcagctaaagacgtaaaattcggtaacgacgctcgtgtgaaaatgctgcgcggcgtaaacgtactggcagatgcagtgaaagttaccctcggtccaaaaggccgtaacgtagttctggataaatctttcggtgcaccgaccatcaccaaagatggtgtttccgttgctcgtgaaatcgaactggaagacaagttcgaaaatatgggtgcgcagatggtgaaagaagttgcctctaaagcaaacgacgctgcaggcgacggtaccaccactgcaaccgtactggctcaggctatcatcactgaaggtctgaaagctgttgctgcgggcatgaacccgatggacctgaaacgtggtatcgacaaagcggttaccgctgcagttgaagaactgaaagcgctgtccgtaccatgctctgactctaaagcgattgctcaggttggtaccatctccgctaactccgacgaaaccgtaggtaaactgatcgctgaagcgatggacaaagtcggtaaagaaggcgttatcaccgttgaagacggtaccggtctgcaggacgaactggacgtggttgaaggtatgcagttcgaccgtggctacctgtctccttacttcatcaacaagccggaaactggcgcagtagaactggaaagcccgttcatcctgctggctgacaagaaaatctccaacatccgcgaaatgctgccggttctggaagctgttgccaaagcaggcaaaccgctgctgatcatcgctgaagatgtagaaggcgaagcgctggcaactctggttgttaacaccatgcgtggcatcgtgaaagtcgctgcggttaaagcaccgggcttcggcgatcgtcgtaaagctatgctgcaggatatcgcaaccctgactggcggtaccgtgatctctgaagagatcggtatggagctggaaaaagcaaccctggaagacctgggtcaggctaaacgtgttgtgatcaacaaagacaccaccactatcatcgatggcgtgggtgaagaagctgcaatccagggccgtgttgctcagatccgtcagcagattgaagaagcaacttctgactacgaccgtgaaaaactgcaggaacgcgtagcgaaactggcaggcggcgttgcagttatcaaagtgggtgctgctaccgaagttgaaatgaaagagaaaaaagcacgcgttgaagatgccctgcacgcgacccgtgctgcggtagaagaaggcgtggttgctggtggtggtgttgcgctgatccgcgtagcgtctaaactggctgacctgcgtggtcagaacgaagaccagaacgtgggtatcaaagttgcactgcgtgcaatggaagctccgctgcgtcagatcgtattgaactgcggcgaagaaccgtctgttgttgctaacaccgttaaaggcggcgacggcaactacggttacaacgcagcaaccgaagaatacggcaacatgatcgacatgggtatcctggatccaaccaaagtaactcgttctgctctgcagtacgcagcttctgtggctggcctgatgatcaccaccgaatgcatggttaccgacctgccgaaaaacgatgcagctgacttaggcgctgctggcggtatgggcggcatgggtggcatgggcggcatgatgtaattgccctgcacctcgcagaaataaacaaacccccgggcagaaatgtctgggggtttttcttttggtcatctttctagtataagattcagacacggacgacgcgagtggcgtccagctcattgattatggggaataacatgcacgtaaaatacttagcagggattgtcggtgccgcgctactgatggcgggttgtagctccagcaacgaattgagtgctgccggtcagagtgtacgcattgtggacgagcagccaggcgcagagtgccagctgattggtactgcgacaggtaagcaaagcaactggctttccgggcaacacggagaagaaggcggttctatgcgcggcgcagcaaacgatctgcgcaaccaggcggctgcaatgggcggtaacgtgatttatggcatcagtagcccgagccagggaatgttgtccagttttgtcccgacggatagccagattatcggtcaggtttataagtgcccgaactgatgtgatccagaggctgggtgacaaacgtataattgcctgatgcgcttcgcttatcaggcctacataaggcattgcaactgattgaatgcttgagaatttgtaggccggataaggcgtttacgccgcatccggcatgaccaacgatcacgttatcagtcatttcaggctggatggctccagcctcgcattagcaaagatgagattatttcgcctgtggtgcagttttgctggtggattgaacacgtaagtgatgcagcgcgcgtaagcattgatcctgggttagcggttgggcgttattcgccgctacggtgcgaacatagacctgacatggcacacccgcgagttttttcagtcgtgggctgaaatcaagcattcggcgagtgatcgcttctatttctttacccggcgttgcttcacgcgttttcaccactgcgccgctaaattgttctttgccactttcatctttaaagcggtaaagcaccgccagataatggtcgaacaagttatgtttccattccggttgggaataggtgtcatattccagattgccattgtcctggcagtcaacgtcgtataacggcaggaaatctaacagactggtaatacgtaatgccagttcacgcatttccgcattattaattgcatgaatgattgctcgcgccagcatttcaatctgcaactcattgacgactaactcacatttgctaccgtcatgtagcgttaatacgaaggtaagattttcgccttgattatcggtaagttccagcgtgttaacccgacgattaatatcggcatttttaagctcatcaaccagaatttctgggatgttttctgccattttcttaatgactttatcgcgagcttgctcatactgaaggtgtgcagcagcatccagtttatgcttttgatgcagacgactttccagcgcaatcagcaggtcgcgcagttccatgacagacataaagaacaagctttctttattgcgaggttctttaattttcagcgccagtgcaatgaaattattactcttgcgaataacaccggtattaacacccttgatgcttatggccatgtaggttctccctaaccatttctcaattaaataattaattttaatttataagccagataaatgggcttggtagtaatagttgttaaaataacataaatagccgtactcactctatataaacagaaaagaaaggttaattattggtgttagctatataaaaagtaacaacagcaatgcatatgaataattaaaggttatgcaacgggcaaagattaaacttcccagtttaatgacaggttgctgtacttgcgtttgttgctcttgccggatgcagcgtaaacgccttatccggcctacagttcattgcaaatccattcaatttcaatgcacgatgtaggcctgataagcgtagcgaatcaggcaattttaatgtttaacttccctgtttaatcagttactgctggcgtagctggagatccagcggcgttttgctgggttcgccgccaatttctcgcgccagtttcggcaccagatatccgctcaccagtgtcagcaactcacgcataatctgccgtgcttcgtcatcactcaccataaaatgcgccgcgccctgtactttatcgagcacatgcaggtaatacggcattacgccggcatcgaacaacgcattactcaggtttgccagcgtttgtgcgttatcgttcacatcacgtaacagaacgctctggttcagcaaagtaacgcctacccggcgcaacttagccatcgcctgacggaatgtttcatctacctcattggcatggttgatgtgattcaccagcaagatttgcagcgtagaacgggcaaagcattcaaccagcgcctcggtgatacgtgccgggatcacaatcggcagacggctgtgaatccgcagacgttttatatgcgggatggcttccagttgtgtgagcaaccagtccagctcgtgatctttcgccatcagcggatcgccgccggagaaaatcatctcgtccagttccggatgcgcagcaacatactcaagtgcagtttgccagttacgcttgttgccctgattttcggcataggggaagtgacgacggaagcaatagcggcaatttaccgcgcagccgcctttgaccagcaaaagcgcccggttgtggtatttatgcaacaaaccaggcactacgctgtgctgttcttccagtgggtcggtggagaatccgggcgcgatgacaaactcatcttggctggtaagtacctgacgcaaaagaggatcgtccggattgcctttctccatgcgatcgataaaactgcggggcacacgcagggcaaaaagctttttggcgctgcgtccggctaacagtttttcctccgcgtctatattcaaaagacgcagaagttcatcaggatcggtcacaacatcggcaagttgcgttaaccaatcttctctggatggggtatttagggttacaatatgcgccattttgtggcttagctaccaattaacaaatttcagagggccttatggcaacgtactatagcaacgattttcgtgctggtcttaaaatcatgttagacggcgaaccttacgcggttgaagcgagtgaattcgtaaaaccgggtaaaggccaggcatttgctcgcgttaaactgcgtcgtctgctgaccggtactcgcgtagaaaaaaccttcaaatctactgattccgctgaaggcgctgatgttgtcgatatgaacctgacttacctgtacaacgacggtgagttctggcacttcatgaacaacgaaactttcgagcagctgtctgctgatgcaaaagcaattggtgacaacgctaaatggctgctggatcaggcagagtgtatcgtaactctgtggaatggtcagccgatctccgttactccgccgaacttcgttgaactggaaatcgttgataccgatccgggcctgaaaggtgataccgcaggtactggtggcaaaccggctaccctgtctactggcgctgtggttaaagttccgctgtttgtacaaatcggcgaagtcatcaaagtggatacccgctctggtgaatacgtctctcgcgtgaagtaatgcggttgtggtgcggcctgcaggctgcaccatcacttattcaggtcagagatgatgaaacgccttatcgttcttgttttgcttgccagcacgctgctcacgggctgtaacaccgctcgcggtttcggcgaagacatcaaacatctcggcaactccatctctcgcgctgccagctaatttttcttctcttccgaaaaatcatcagattcccatcatttttggcgatgttgtctattattaatttgctataggcaaacataaataacattacctaaaaggaagacgttatggtgaagaagacaattgcagcgatcttttctgttctggtgcttagtacagtattaactgcctgcaacaccacgcgtggcgttggtgaagacatttctgatggcggtaacgcgatttctggcgcagcaacgaaagcgcagcaataagcaataacggtacgacagctgtgtcgtgccgtttgttttttctgcgatagtcacaaaggtaatagttgaaattcccctgccacctggcaaaatatccgttcaaccatcagctttgcaggacgacctgcaaacgcctcttttcaccggggacggccccaattctccggagcctgatatgtcctggattatcttagttattgctggtctgctggaagtggtatgggccgttggcctgaaatatacccacggctttagtcgtttgacgccgagtgttattactgtgacggcgatgattgtcagtatggcgctacttgcctgggcgatgaaaagcttaccagtagggacggcttatgccgtgtggacgggtattggcgcagtcggcgcggccataaccggcattgtgctgctcggtgagtccgctaacccgatgcgcctggcgagtctggcgttaatcgtattggggattattggtctgaaactcagcactcattaactaccaggctgctgtacccaaataaatttactgacatcaaacccttcccgggtcgcgactgccagcatctcctgtttcacttcgtcagaaatggttggcgtgcgggagagtatccacaggtagtcgcggtccgggccgcaaaccagcgcatggcggtattcccgatcgagtgcaataacgttataaccgccatagaaaggaccaaagaaactcactttcagcgcagcgcgagttggtgcgccggtaaagtacgctttcccttcactctgctgccacattcctctgtcagggttatagcctttattaatgacattcaggccgccgtcatcacgcaggctgtatgttgcggtgactttttccagtccacgttcaaagcggtgatcaaaacgggcaatctcataccaggtaccgagataacgtttggcgtcgaaattatttactacggtcacgccacgcggcggcgtaggagaactgcaggcaacgaccagaaatgcagctgtcgctgcggcaacgagagggagcaggcgcataaatgtttccttactggtttttttctaagtgtagatgacagcaaggaaaagcggagaaaaggtccgaaaattcggacccgatggaattttactgtagagcgttaagaatctgccaggcggcgtcgactctcgctggattgggatagtttttgtttgccagcatcacgatacccagctctttttctggaataaacgcgacatagctaccaaatccgccggtcgcccctgttttatgtacccaacttgcgcgtactgcaggagttgggggcgtaatcgcttttacggggcgtgctgccagtgcaattttattgtcactgccgttaatgatgctgtcaggatttaccggccagtccagcatttcccagcccaggccctgatacatatcgccggtttgccagtagcgagattgtgccagttgtatcccttgttgaagcgttttctcattgatatcaaggggttttaaattgctttgcacccagcgggccatatcttcaatggtgctcttcacaccataagcttcagcatctaacgccccagggctaacatgcactgccttaccttcgcgatatccccaggcgtaattcttttcttctgcgggcggtacattaatccacgtatggttgagtttgagtggctggaagacacgagtttgcatcgcctgctcaaaactcaaaccagacggcttcacagccagtgcgccgaacaaaccgatactggagttggcatacagacgttgtgttcctggagcccatgcaggctgccagttttgatagaagcgcagcaagtcgctactggatttcacctcatccggcacctgcaatggcaggccgccagcagtgtaggttgcgagatgtaatagtgtgatcccattccactgtttagcggtaagttcaggccagtattttgttgtgggatcgcttaacttgatttcccctcgagcaatagcgtcgccaccaagcacgccagtaaatgttttgctgacgctacctaactcaaacaacgtttgctgtgtgacgggctgctttttggcgatgtccgcatagccccaggtaaagtaataaggtttaccctgataaattaccgccaccgccatacccgggatcttttgttgctctataagcggggtaattgtgcgatgcacaatatcgttgatttgttgaggggcagcaaatgtggagcaagaggcggtaattaataaggcgcagagcgtcgttttgaacatagggtctggtttccatacaaaacggcccgccataggcgggccggatttacattggcgatgcgttagattgtaacgacaccaatcagcgtgacaactgtcaggatagcagccagaccgtagaaaacccatttgcccgcaggtacgtggattttcagatcgtgcatcgcgtggtgcatacggtgtaaaccacaccacagcggcagaacgatcatcaggaacaggaatacgcgaccaatgaagctctgcgcgaacgccagaacgcgctcgtagctcagcgcatcacccggaaacaaccccagtggcagcagaatacccaccagcaggatcatcaccggcgcaatgatggcgctccacataccaccggccccgaagaggccccagaataccggttcgtcagaacgctttggatttggattaatcatctcaggctccttaccagtacagggcaacaaacaggattacgatggtggcaaccacagttaccgcccagagacttttgataattggctctggtcccattttttcgtcttttacaatgatattggccgctttcggtgccagttcaaaccaggttttggtgtgcagcagagctgccgccagagtgatcaggttaatgatcacgataaccgggttttgtaaaaagtcgacgaatcccgcccaggcttccgggccatttttcagggcaaacagcccgaaaatcagttcaatgctgaaccacacagccggaaccgccgtgccttcgcgcagcatgtaaaagcgataaaacggcaattttttccaccaggtggacgtcattggccgtacatacggtttacgtttagtcgtcatgttgcactccttagcgtggtttcagggtcgcgataagaaagtctttgctactttctactttgccctgctgaatggccgcagccggatcgacgtgtttcgggcagacttcggagcagtagcccacgaaagtacagctccatacgccgttctggctgttcaactgcgccatacgctccttcttaccgtggtcgcggctatcttcgttataacgatgcgccagcgtaatggcagccggaccgatgaactctgggttcaggccaaactgcgggcacgcggcgtagcacaaaccacagttgatgcaaccggagaactggtgatacttcgccatctgcgccggggtctggatgttagtaccctgatccgcggtgcgggagttgccgatgatgtacggtttgatcgcttccagactttcgatgaagtgggtcatatcgaccaccagatcgcgttcaatcgggaagttagctaacgcttcaaccttcataccgtcggtgtaatcacgcaggaaggttttacatgccagttttggcacgttgttaaccatcatgccgcaggaaccacaaatcgccatacggcaggaccagcggtagctcaggtccggtgccaggttgtctttgatgtagcccagcgcatccagtaaactggtagttgcgtcataaggcacttcatagaatgcgctatgcggtgcggtatcgacttccgggttatagcgcaccacctcaattttcaggtttttcatctcagccattcgccttctccttcttattggctgcttccgccttatcggctgcatccgcttcgccaccgtaaacgcgtttagctggcggcagcgtagtaatcttcacgtcgctgtactccaggcgagtcgtgccatcagcatcgcggaaggcgagggtgtgtttgaggaagttgacgtcgtcacgctcggtgcaaccttcgtccagacgctggtgcgcgccgcgggactctttacgtgccattgcggagtgcgccatacattcagcaacgttcagaccgtggcccagttcaatggtgtagagcaggtcggtgttgaacacgctggaagtgtcggtgatgcgcacgcgcttgaagcgttcctgcagctctgccagcttgtcgatggttttctgcatcagttccggcgtacggtagataccgcagccttcttccatagccaggcccatttcgtcgcggatcttcgcccagttttcgccgccatcctggttaaccagatctttcagacgttgttcaacgccagctgcctgcgcttcaattgccgcttcgttgccattaccggcagttgctgcacgctctgtcgcttgttcaccggccagacggccgaagaccaccagttccgccagggagttagaacccagacggtttgcaccgtgcagaccaacagaggaacattcacccacggcgaacagacctttaatgcgggtttcacagttctgatcggtttcgataccgcccatggtgtagtgtgcggtcggacgtaccggaatcggttctttaaccggatcgacgccaacgtacgctttcgccagttcgcagatgaacggcagacgttcatgcagttttttctcgccgaggtgacgcaagtcgagataaaccacatcgccacgcggcgtggagatggtgttgcctttacgccattcgtgccagaaggcctgagagactttgtcgcgtggacccagttccatatatttgtttttcggctcgcccagcggagtttccgggcccatgccgtaatcttgcagataacggtagccatttttgttgaccagaataccgccttcaccgcggcaaccttcggtcatcaggataccggaacctggcagaccggttgggtgatactgaacgaattccatgtcacgcagcggaacgccgtggcttagcgccatacccataccgtcaccggtaacgatgccgccgttggtgttgtaacgataaacgcgacccgcaccgccagtagccataacgaccgcgttagcacggatctgcaccagcgtgccttccatcatgttcattgctaccaggccgcgaacatgaccatcatcaaccagaatatccagcacgaaatgttcgtcaaaacgctggatctgcgggaattgcagagaggtctggaacagcgtgtgcagcatatggaagccggtcttatcggcggcgaaccaggtgcgctcgattttcatgccgccgaagcgacgtacgttgacgctaccatccgggcgacggctccatgggcatccccacagttccagttgggtcatttcggttgggcagtggtggacgaaataatccacgacatcctgctcacacaaccagtcgccacccgctactgtatcgtgaaagtgatattcgaagctgtcatgatcctgcgcgacagcggcggagcccccttctgcagcaacggtatggctacgcatcgggtatactttactgattagtgcgatttttgcattcggatttgcctgcgcggcagcaattgcagcacgtaatcccgcgccaccggcgcctacaatggcaagatcggcttgaaaggtttgcacgacattcctccagattgtttttatcccacagccacgtacttcagggtaagtacctgaaagttacggtctgcgaacgctattccactgctcctttataggtacaacagtatagtctgatggataagtctgaaatttgacgagatcgatttttttagtgcgcaagagggctaaattatcactgaagatgattaatttaattactaaaccatcagatcgtgctttttttagtcactgcccaccgctgtttgattcctgcgtaaaatttgtctcgccgtcgcgttgcgagtagacttcgtgcccttgtcaaaaactggagatttaactatgagcgaaacggcatcctggcagccgagcgcatccattcctaacttattaaaacgcgcggcgattatggcggagatccgtcgtttctttgccgatcgtggagtgctggaggtggagacgccttgtatgagccaggcgacggtaaccgatattcatttggtcccgtttgagacacgtttcgttggccccgggcatagccaggggatgaatctctggttaatgaccagcccggaataccatatgaaacgcctgctggttgccggttgtgggccggtattccagctgtgccgcagcttccgtaatgaagagatggggcgttatcacaaccctgagttcactatgctggagtggtatcgaccgcactatgatatgtaccggttgatgaacgaggtggacgatctcttacaacaggtgctggactgcccggcagcagaaagcctttcttatcaacaagctttcttgcgttatctggaaattgacccgctctctgccgacaaaacgcaactgcgggaagtcgcagcgaaactggatttgagcaatgttgctgataccgaagaagaccgcgacacgctgctacaattgctgtttacctttggcgtagagccaaatattggcaaagaaaaaccgacctttgtgtaccactttccagccagccaggcaagtctggcgcaaatcagtaccgaagatcatcgggtcgctgaacgctttgaggtttattataaaggtattgagctggcgaatggtttccatgaattgacggatgcccgtgagcagcaacaacgctttgaacaagataaccgtaagcgcgcggcgcgcggtttgccgcagcaccccattgaccagaatctgattgaagccttgaaagtcggtatgcctgactgttccggcgtggcattaggtgttgatcgtctggtgatgttggcgctgggcgcggagacactggctgaagtcatcgcctttagcgttgaccgggcataattctgaaaaattactgaattaacagcgaagaatggcgtgataagcgccattctgtagcatatgttttcatttttccgttaaaggccacaatttaagactggatatttgatatcatccaggtatcaattctgtattggtttttacgctgcctgctcaatgttgcgcagtgcagttcagtgggcacgtgttatacacgcgctgaaatgaaggatggtttcatgcctcacacgataaaaaagatgagtctgataggactcatattgatgatctttacttccgtatttggatttgccaatagcccaagcgcttattacttaatgggttatagtgcgattcccttttatatattttctgcattgttattctttattccattcgccttaatgatggctgaaatgggagctgcttatcgcaaagaagaaggcggtatctattcctggatgaataatagtgtcggaccacgttttgccttcattggtacgtttatgtggttttcctcttatatcatctggatggtgagtacctccgcgaaagtttgggtaccgttcagtacattcctctatggtagcgacatgacccagcactggcgtattgccggactggagcctacgcaggtggttggtctgctggctgtggcatggatgattctggtcaccgtcgttgcttctaaggggattaataaaattgcccgcattactgcggtgggcggtattgcagtaatgtgtctgaatttagtattgctgttagtaagcattactattttgttattaaatggtgggcatttcgcgcaggatattaatttccttgcaagtccgaacccgggttatcagtccggtctggcaatgctaagctttgtggtatttgccatttttgcctatggcggaattgaagcggttggtggtctggtcgataaaacggaaaatccagaaaagaactttgccaaaggtattgtttttgccgctattgttattagtatcggttatagcctggcaatatttttatggggcgtcagcacaaactggcagcaggtattaagtaatggttccgttaacctcggcaatattacctatgtgctgatgaagagccttgggatgacgctgggtaatacactgcatttgagtcctgaagcgagtttgagcctgggcgtatggtttgcgcgtattactggacttagcatgttcctcgcctataccggtgcgttctttacgctttgctatagtccgttgaaagccatcatccaggggacgccgaaagcattgtggccggaaccgatgacgcgcctgaatgcgatggggatgccgtctatcgccatgtggatgcagtgcgggttggttactgtcttcatcctgctggttagctttggtggcggtaccgcaagcgcgttctttaacaagctgacgctgatggcgaacgtgtctatgacgcttccttacctgttcctcgcgctggctttcccgttctttaaagcacgtcaggatctcgacagaccgtttgtgattttcaaaacgcatttgagcgcaatgattgcgacagtggttgtcgtactggtggtgacatttgcgaacgtcttcaccatcattcaacctgtggttgaagccggagactgggacagcacattgtggatgattggcggccctgtcttcttcagcctgttagcgatggcgatttaccagaactattgcagcagagtggcaaaaaatccgcagtgggcggtggaataacccgatgccctatcgtctacctgacgatagggcgtaaagacaggaaatgttatggatgacaccagccgggacccggcaataaccgaagatgaaatcagggcgctgcaattttctgccggggatgtagcggaaatagagcagacgattctctcttttgtcgatgcctgccacacccgtaaagtggcgatggtggtgggtagcaccattaacaccctcaaagatcgcgatggtaaacggtggggaaacctgccggatatttattgcgcttatcttatccgatgtctggtttttcgcggggaattagtgggatacggcgatttgtttcgtatgcgctatagcgaaattaagcgaccggttaccttatgagtgcgcgcatgtttgtcttatgctgcatctggtttattgtggcgttcctctggataaccatcacttccgcgctggacaaagagtggatgattgatggacgcgggattaacaacgtctgcgatgtgttgatgtatctcgaagaagacgatacccgtgatgttggtgtgataatgacgttaccgctctttttcccttttctctggttcgctttgtggcgaaaaaaacgcggctggtttatgtacgccaccgcgctggctattttcggctactggctgtggcagttttttctgcgctatcagttttgtttgtgagccggattggttcatccggcacacaaacttacaaacttcccgcctgacgacctttgcccgcagacgtcagcgttctccccgtttgtttaccgttgaggctttccagacgcatctggaagggcgggaatggcatatcgataccgtgggcatggaagccagccagaatcagctggtggatctcatggcgtagcggcatacggtgacccatctcagcggcgtaaatacgcagctcgaaaatctgaatcccctgttgcagatccaccaggaagacttccggtgccgggttgtcgatcaccaggctgcagcgacgcgctgcggtgagcaggatttccgtcacttcttcgctattggcatcggcaggggccggtatcgtcaacaccacgcgcgtgacgctgtcagagaggctccagttgataaactgctcggtaataaacgccttgttcggcacgattatctctttacggtcccagtcgctgatggtggtggcgcgggtgttaattttcgtcacgctaccggtgagatcgcgaattgtcaccgtatcgccaatgcgaatcggtttttcgaacaggataatcagaccagagataaagttggcgaaaatttcctgcaaaccaaaaccgagaccaacaccgagcgcggcaaccagccactgcaatttgctccactcaataccaatcatactgaagccgaccagcccgccaatcagcatcagcagatatttggtgatggtggtgatggcgtaacccgtacccggcgttaaatccaggtgctgcaaaatcgccagttccagcagcgcgggcaagttgcgcaccagctgcgtggtgatgataaacaccagaatggcaatcagcaccgcaccgagggtaattggctccagactttctacgccctgtaccgtggaggtgacatcccacaggctaatattttcgaggaagccgaaagcggaatggatttcactccacagcacaatgacagaaagcagggcgatcaacatcaaaatactgcgcaccagccgcaaggattgcgcactgatggcatcgagatcgacttcgctttcatcgacttcaattgctccttccgggctactgtgatgatgcgcttcctcttcgccacgcgcacgttgcgctaacatctctgcccggcgatgcttcgcccgatcaaacgccagcctgcggcgctggatcagcatccagcggcggataacgtgataaaccaccagtagcaggaaccagatggcaacgctggtttcaagcctcgctaacagcgcctgtgccgttgccagataacccaccgcgctcgccagaatggcaaccaacggcgcgccaatcatcatgttccacagcatatggttggtaatgttgtcgccgctgccctctttgttgagatacagcggaatcccggcctttttcaggctgagggtgaccaccgccagcgcaccgcaaatgaggataaagcaaagccgtcccaggctaccggagaattcacggtcgtcgaggttatcgaacatcatcagcgccataatcagcggcacaataagcccgatgctcatcaggtagtagcgcatcccacgggaaacacgttcgcgcggccagccaaaatgagcgataaacaagccgttcgggcgggcaaaggtggcgcaaatcatcactacccacagcagcggcacggtggccgttacaccatcgccaatcgcgaccgccagcggataaggccacgcctcgcgcaagccgtaacccagcgtcatccacagcaccggtaacggactcgcgacgagaatgctccagaaaagagtgcgcaacgtcagccagaagtgatcctgagtcactttgccaactttcgccgcgctacgttcaagaaaacgggtgaaatagcggcggctgtaaatactgcaaccgaccagaatcaacgcgccaaacagcggcaaaattgtctctttgctggtcagcatcatcacactggctttgcccaactgactgaaggtgtccaggctaatgagacgacgcagatcctgggcgatttccagcggccaggcgatggtcatcgggcgcacgtcagaggtccagaacagatagcggtgcgttgcttcgttcacctctttcagcgcatcctccagttgcccgttggagactttcagcttggtcagttccaatagtagcgtgtcgccaccctgcaacaaactgttcagcaactcacgctgagtgcgcagttgtgcttccagaatacggttttgctcggcagtcagcggctgaccgtcggcctgatgaatttgccgtagcagcggctgtttattaagcagatcctcataacgtaaccgttgcacacgcaactgcgccatttcggtatcaagctgttgtggtttcggcatttccggcagccgtgccacctgcgcccgcagcgcttcgccgagcagattggagcttcccagccattggctctgttcacgcagcgtattcaacgcctgccggacctgtaacgtctggctggcagcctgacgctgttggctggcaacgagatccatccgctgcgcctgttgattcaaagccgcgcttagttcgcggttaattttgaattgcgcgacgatatctttcggcaaatcggcgctgttttctgccagcaattcggtactttccagcgcccgctccgcctcaagctgacgttggctgtttaattgattacgcaaggcctgcaaatacgcatccagttgctggctctctttttccgccagctcactgcgtaagcgcgctaattcctggcggttattggcagacagctgcgccagctccagttcatcaacgagcgccttaagacgtgcagagtcagactgcaacgcgaaattttgtgcctgattgagcggagtattgccggtaagcgttcccaggcggcgctcgatctcatttaactgacggcgggcgtcggtttgctgttgcggcagttgattcaggctatcggcaatctcgcgggcgcgctcctgctcttgctgggcctgacggcttttatccagcaactggctgctgacctggagaatttcctgattcagcgcgtcggtagacattcccgggctcacgctgcgcggctcgtcacgcatgttgtttaattgtgcgcgcagagtagcggagagtttcggataattatcgataacttgctgatattgtttgatgcgctcaagggaaccttttcgttcctcaagcgcatttaaggcagactggagcgcctctacgacttccggctgtgcgggtttcgccgcttttgcctgctccagttcctgagtgatttgtttgctatcgggggccgtcgcggcgtacgccccccaactgaggcaccaggccatcagaaaagtgataatcaggcgcacgtcagcgtttcctttgatggattagacctggtcttttttgtcgtcaaccaatgggctggcgtcgtgttctgcttcgatctcttcagcaggaagcggggcaggttcagcgtctggcgtaacaaaggtttcggtagatactgccagcggctggccaattttcgtgacagacaggctttccagttgctcaaccagattcactttacccggtgcaaacaggttgataacggtggaaccgagtttaaagcgacccatttcctggcctttcagcagtgccacagaaccgtcgttttccccggcaggccaggtccagcgcttgatgataccttcgcgcggcggcgtaatggtgcccgcccagaccgtctcaatgctgccaacaatcgtcgctccgaccagaatctgcgccattgggccaaattcggtatcgaaaaggcaaatcacgcgttcgttacgggcaaacagattcggcacgttctgagccgtgagatggttaacggagaagagatcgcccggcacgtagatcatctcacgcagaataccgttgcacggcatgtgtacgcggtggtagtcacgcggggagaggtaagtggtcacaaacgtaccgttgcggaacaggtccgccatcagatagttgcctgccagcagggcttcgaggctgtagttgtggcctttggcttgcaggattttatcttcttcgattttacccaactggctgataacgccatcggcaggcatgaccagtacattcggatcggtatcgattgggcgtacttcgtcacgcagcggacggacaaagaattcgttaaaggtgcggtagctggcggtgtccggcttttgcgcctctttcatgtcgaccttgtagtatttaacgaacagatcgataaccagttttgtcagccatcctgcccgcttgcttgcgccccaacccgccaggcgagtaagccatagtttcggcagaatgtactgtaggctaagtttaaaactatttaacaaggtagcctccaggccattgttttgtcgttcctgatccggcctacatgccggatcctgaaaaaaaggggacgattctaacgacggttagcttaattgtcagtcatccgtatcagaaaagtttttacgcgtttttacctgcgccatgctttccagaatacggtgatagttttcgaaacgggtttccgcgattttcccttcctcaaccgcttcccggatagcgcagcccggatcggtatcgtgtttgcaatcgcgatatttacacagacctaaatagtcatggaattcgacaaagccctgagtgatttgttccggctccaggtgccagaggccgaactcacgcactcctggggagtcaatcacatcaccgccgtgcgggaagtgatacagccgagcggcggtcgtggtgtgctgaccgagcccgctgttgtcagagatatcgttggtcaggatctctttttgcagccccagcaacgcattcagcaggctggatttgccgacgccagactgcccggcaaaaatgctgatgcgcccggtcaacgcctcttccagcggttttagcccatcctgagtatggctggaaaccatcaatacgcgataaccgatattgcggtagatatccatctgctcgttgacgaacgccatgccttcgtcgtccagcaggtctatcttgttgagcacaataatcggctcaatctgcaaggtttcgcaggccaccaggtaacggtcgataatattgaggctcagctccggcaaaatggcggagacaatgacaatctggtcgatgttggcggcaataggttttacgccgtcgtagaaatccggacgcgtcaacacgctggtacgctcatgcaccgcttccacgatccctttgacatttacgccttccgccgccggtttacccggacgccagactacgcggtcgccggttaccaggctacggatggtacggcgaatattgcagcggtgaacgtcgccatcggcggattccacatcagcgtgcataccaaagcggctgatgacgataccttcatcaggctcgccaaacagattgtcgtcgtagtcgggcttctccttagacgttttaagacgacgctggtgattggcgttcacgcggcgctgctggcctttggagagtttatttttactcaatcgtacagactcctggtcgcccctgatgggcaaaacatctatgatacacgcaattgtggatcaatatagtcactgtgaatgggtggaaaatagcatgagtgccaatgaaaacaacctgatttggatcgatcttgagatgaccggtctggatcccgagcgcgatcgcattattgagattgccacgctggtgaccgatgccaacctgaatattctggcagaagggccgaccattgcagtacaccagtctgatgaacagctggcgctgatggatgactggaacgtgcgcacccataccgccagcgggctggtagagcgcgtgaaagcgagcacgatgggcgatcgggaagctgaactggcaacgctcgaatttttaaaacagtgggtgcctgcgggaaaaagcccgatttgcggtaacagcatcggtcaggaccgtcgtttcctgtttaaatacatgccggagctggaagcctacttccactaccgttatctcgatgtcagcaccctgaaagagctggcgcgccgctggaagccggaaattctggatggttttaccaagcaggggacgcatcaggcgatggatgatatccgtgaaagcgtggcggagctggcttactaccgcgagcattttatcaagctgtaaaatttttcctggtcacgtaagcgccggaatccacttgcggcggcgtgattttgacgctaaattgaacgtcttgctgataatttcagcacttgagataaaaacgcaaaaaaaacttttttggggggttgcagagggaaagatttctcgtataatgcgcctcccgtaacgacgcagaaatgcgaaaattacgaaagcaaaattaagtagtacgcgggaatagctcagttggtagagcacgaccttgccaaggtcggggtcgcgagttcgagtctcgtttcccgctccaaaatttgaaaagtgctgcaaagcacagaccacccaagcgggaatagctcagttggtagagcacgaccttgccaaggtcggggtcgcgagttcgagtctcgtttcccgctccaaaatttgaaagtgctgtaaggcacagaccacccaagcgggaatagctcagttggtagagcacgaccttgccaaggtcggggtcgcgagttcgagtctcgtttcccgctccaaattcttctctcaataaaatatccacagcgacgcgatgcgttattgctggtttttgttgtctctgacaaactcttgtaaacagagttatccacagcctcaggctgtaatcttaatttcaaagaaacttcgcacggtgaatagtatttttttaacctattgatagataagttaaaaattaagattccgttttgtcgagtcgatcacttgacgattttattcgtcttgaattgcaatgcgtttttatttttattcacaagctgtggatgaatcaggcgtcacgcggtaaccctttttcaatcacccgaaccagacgctgttttttcggcaattgcacttcgactatgcacgcatttcgtctctctatttgctgcgcaatcgcccacgctatgtgctcatcgagaagtgggtgctcacctttacgactttccagcgctgtcaaaatcgtttcatcccaaggggcattgcctaatgctacggcgatattacgcagccaacgcaggtgaccaatacgacgaatcgcgcttccttccgtgacttttaaaaacttctcttcgctccaggcgaataactcaatgagttccggtgcgtgtagcggcttacgcgggctgaaatcctcttctgtggtgagttgactatagcgattccacgggcagataagctggcagtcatcgcaaccgtaaatacggtttcccattaacggtcgcaactcttccgggatcgccccttcaagttcgatggtgagataagagatacagcggcgagcatcgacggtatatggctcgacgatggcaccggtcgggcaaatcgtcatacaggccacgcatttgccgcatccttcctcgactggttgatccacgggcagcggaatatcgaccagcaattcgcctaaaaagaagaagctaccggcctcgcgattgaggataagactgtgcttacctgtccagccgagcccagctttttcagctaacgggcgctcgagaataggcgcagaatcgacaaacggtctaaaattcaggctaacacaatgttgctgaatcatctcgcccagctttttgagtcggttgcgcagaagtttgtgatagtcacggcccagcgcataacggctaacatagccgagtttggggtttttcagcgtgctggcaaatgcggcgttagcaggaaggtaattcatccgcacgctgatcacgcgcagcgtaccgggcaataactcatgagggcgagcgcgcagcataccgtgacgtgccatccagtccatttcgccgtggtattgtttgtccagccatgcttgcagtttgggctcggactcgctgagatcggtatcggtaatacctacctgctgaaagcccagttccagcccccactgtttaattttttgcgctaactgattgagatcgaggggctcactcatgacggaccatacaatgaagaaaaaccccgtaagtataccacacaccgtctggtacgccgacgatatccgccgcggagaacgcgaggcggcagatgtgctggggctcacactctatgagctgatgcttcgcgctggcgaggccgcattccaggtgtgtcgtagcgcgtatcctgacgcccgccactggctggtgctgtgcggtcatggtaataacggcggcgatggctacgtggtcgcgcgactggccaaagcggtcggcattgaggtcacgttgttggcccaggagagcgacaaaccgttgccggaagaggccgcgctggcacgcgaagcatggttaaacgcgggtggcgagatccatgctagcaatattgtctggcccgaaagcgtagatctgattgttgatgcgctgctcggtaccggtttgcggcaagcgccccgcgaatccattagccagttaatcgaccacgctaattcccatcctgcgccgattgtggcggttgatatcccttccggcctgctggctgaaactggcgctacgccaggcgcggtgatcaacgccgatcacaccatcacttttattgcgctgaaaccaggcttgctcactggaaaagcgcgggatgttaccggacaactgcattttgacagtctggggctggatagttggctggcaggtcaggagacgaaaattcagcggtttagtgcagaacaactttctcactggctaaaaccgcgtcgcccgactagccataaaggcgatcacgggcggctggtaattatcggtggcgatcacggcacggcgggggctattcgtatgacgggggaagcggcgctgcgtgctggtgctggtttagtccgagtactgacccgcagtgaaaacattgcgccgctgctgactgcacgaccggaattgatggtgcatgaactgacgatggactctcttaccgaaagcctggaatgggccgatgtggtggtgattggtcccggtctgggccagcaagagtgggggaaaaaagcactgcaaaaagttgagaattttcgcaaaccgatgttgtgggatgccgatgcattgaacctgctggcaatcaatcccgataagcgtcacaatcgcgtgatcacgccgcatcctggcgaggccgcacggttgttaggctgttccgtcgctgaaattgaaagtgaccgcttacattacgccaaacgtctggtacaacgttatggcggcgtagcggtgctgaaaggtgccggaaccgtggtcgccgcccatcctgacgctttaggcattattgatgccggaaatgcaggcatggcgagcggcggcatgggcgatgtgctctctggtattattggcgcattgcttgggcaaaaactgagcccgtatgatgcagcctgtgcaggctgtgtcgcgcacggtgcggcagctgacgtactggcggcgcgttttggaacgcgcgggatgctggcaaccgatctcttttccacgctacagcgtattgttaacccggaagtgactgataaaaaccatgatgaaagcagtaattccgctccctgaataaggaagtgactgataaaaaccatgatgaatcgagtaattccgctccctgatgagcaggcaacattagacctgggcgagcgggtagcgaaagcctgcgatggcgcaaccgtaatctatctgtatggcgatttaggcgcaggtaaaaccacctttagccggggctttttacaggctctgggtcatcagggtaatgtcaaaagccccacttatacgctggtcgaaccctatacgctcgacaacttaatggtctatcactttgatttgtaccgccttgccgatcccgaggagctggagtttatggggatccgcgattattttgccaacgatgccatctgcctggtggagtggccacaacaaggtacaggtgttcttcctgacccggatgtcgaaatacacattgattatcaggcacaaggccgtgaggcgcgcgtgagtgcggtttcctctgcgggtgaattgttgctggcgcgtttagccggttaacctttgaaaggtggcgggatgatgtatcgcatcagaaattggttggtagcgacgctgctgctgctgtgcacgccggtgggtgccgcgacgctctctgatattcaggtttctaacggtaatcaacaggcgcggataacgttgagttttattggcgatcctgattatgcgtttagccatcaaagcaaacgcaccgtggcgctcgatatcaaacaaacgggcgtgattcagggactgccgttgttgttcagcggcaataatctggtgaaggcgattcgctctggaacgcctaaagatgcacaaacgctacggctggtggtcgatcttaccgaaaacggtaaaaccgaagcggtgaagcggcagaatggcagcaattacactgtcgtctttacgattaacgccgatgtgccgccaccgcctcctccgccgcccgtggttgcgaaacgcgttgaaacgcctgcggttgtcgcaccgcgcgtcagcgaaccggcgcgcaatccgtttaaaacggaaagtaaccgcactacgggtgttatcagcagtaatacggtaacgcgtccggcagcgcgcgcgacggctaacactggcgataaaattatcatcgctattgatgccggacacggcggtcaggaccctggcgctatcggccccggtggtacgcgggagaaaaatgtcaccatcgccatcgcgcgtaaattgcgtactttgctcaatgacgatccgatgtttaaaggcgttttaacccgtgacggggattactttatcagcgtgatggggcgcagtgatgtggcacgtaagcaaaacgccaatttcctcgtgagcattcacgctgatgccgcaccgaaccgcagtgcgactggcgcttccgtatgggtgctctctaaccgtcgcgccaacagtgaaatggccagctggctggagcagcacgagaaacagagcgagctgctgggtggggcgggtgatgtgctggcgaacagtcagtctgacccctatttaagccaggcggtgctggatttacagttcggtcattcccagcgggtagggtatgatgtagcgaccagtatgatcagtcagttgcaacgcattggcgaaatacataaacgtcgaccagaacacgccagccttggcgttctgcgcagcccggatatcccaagtgtactggtcgaaaccggttttatcagcaacaacagcgaagaacgtttgctggcgagcgacgattaccaacaacagctggcagaagccatttacaaaggcctgcgcaattacttccttgcgcatccgatgcaatctgcgccgcagggtgcaacggcacaaactgccagtacggtgacgacgccagatcgcacgctgccaaactaaggacgattgatgccaattcaggtcttaccgccacaactggcgaaccagattgccgcaggtgaggtggtcgagcgacctgcgagcgtagtcaaagaactagtggaaaacagcctcgatgcaggtgcgacgcgtatcgatattgatatcgaacgcggtggggcgaaacttatccgcattcgtgataacggctgcggtatcaaaaaagatgagctggcgctggcgctggctcgtcatgccaccagtaaaatcgcctctctggacgatctcgaagccattatcagcctgggctttcgcggtgaggcgctggcgagtatcagtagcgtttcccgcctgacgctcactagtcgcaccgcagaacagcaggaagcctggcaggcctatgccgaagggcgcgatatgaacgtgacggtaaaaccggcggcgcatcctgtggggacgacgctggaggtgctggatctgttctacaacaccccggcgcggcgcaaattcctgcgcaccgagaaaaccgaatttaaccacattgatgagatcatccgccgcattgcgctggcgcgtttcgacgtcacgatcaacctgagccataacggtaaaattgtgcgtcagtaccgcgcagtgccggaaggcgggcaaaaagaacggcgcttaggcgcgatttgcggcaccgcttttcttgaacaagcgctggcgattgaatggcaacacggcgatctcacgctacgcggctgggtggccgatccaaatcacaccacgcccgcactggcagaaattcagtattgctacgtgaacggtcgcatgatgcgcgatcgcctgatcaatcacgcgatccgccaggcctgcgaagacaaactgggggccgatcagcaaccggcatttgtgttgtatctggagatcgacccacatcaggtggacgtcaacgtgcaccccgccaaacacgaagtgcgtttccatcagagccgtctggtgcatgattttatctatcagggcgtgctgagcgtgctacaacagcaactggaaacgccgctaccgctggacgatgaaccccaacctgcaccgcgttccattccggaaaaccgcgtggcggcggggcgcaatcactttgcagaaccggcagctcgtgagccggtagctccgcgctacactcctgcgccagcaagtggcagtcgtccggctgccccctggccgaatgcgcagccaggctaccagaaacagcaaggtgaagtgtatcgccagcttttgcaaacgcccgcgccgatgcaaaaattaaaagcgccggaaccgcaggaacctgcacttgcggcgaacagtcagagttttggtcgggtactgactatcgtccattccgactgtgcgttgctggagcgcgacggcaacattagtcttttatccttgccagtggcagaacgttggctgcgtcaggcacaattgacgccgggtgaagcgcccgtttgcgcccagccgctgctgattccgttgcggctaaaagtttctgccgaagaaaaaagcgcattagaaaaagcgcagtctgccctggcggaattgggtattgatttccagagtgatgcacagcatgtgaccatcagggcagtgcctttacccttacgccaacaaaatttacaaatcttgattcctgaactgataggctacctggcgaagcagtccgtattcgaacctggcaatattgcgcagtggattgcacgaaatctgatgagcgaacatgcgcagtggagtatggcacaggccataaccctgctggcggacgtggaacggttatgtccgcaacttgtgaaaacgccgccgggtggtctgttacaatctgttgatttacatccggcgataaaagccctgaaagatgagtgatatcagtaaggcgagcctgcctaaggcgatttttttgatggggccgacggcctccggtaaaacggcgttagccattgagctgcgtaaaattttaccagtagagttgataagcgttgattctgcccttatttacaaagggatggatatcgggacggcgaagccgaacgctgaagagttactcgccgcgccgcaccgattgctggatattcgcgatccgagccaggcttacagcgctgctgattttcgccgcgatgcgctggcggaaatggccgatatcaccgcggcggggcggatcccactgttagtgggcggtacgatgttgtatttcaaggcattgctggaagggttgagcccgctaccgagcgcagacccggaagtacgggccagaattgagcaacaggcggcagagcaaggttgggagagtttgcatcgtcaacttcaggaggtagatccggttgcggcagcaaggattcatccaaatgatccacaaaggctttcccgggcactggaagtttttttcattagcggtaaaactttaacggaactgacgcaaacgagtggagacgctctaccgtatcaggtgcatcagttcgccatcgccccggcgagccgtgaactgctccatcaacgcattgagcagcgttttcatcagatgttggctagtggttttgaagcagaagtccgggcgctttttgcccgaggagatttgcatacggacttgccttccattcgttgcgtgggttatcgccagatgtggtcttaccttgaaggcgaaatcagttacgatgaaatggtttatcgaggtgtttgcgccacgagacagttggcgaagcggcagataacctggctgcgtggttgggaaggggttcactggcttgacagtgaaaaaccagaacaggcgcgtgacgaagtattacaggttgttggtgctatcgcaggctgaatgtgtacaattgagacgtatcgtgcgcaattttttcagaatcgaaaggttcaaagtacaaataagcatataaggaaaagagagaatggctaaggggcaatctttacaagatccgttcctgaacgcactgcgtcgggaacgtgttccagtttctatttatttggtgaatggtattaagctgcaagggcaaatcgagtcttttgatcagttcgtgatcctgttgaaaaacacggtcagccagatggtttacaagcacgcgatttctactgttgtcccgtctcgcccggtttctcatcacagtaacaacgccggtggcggtaccagcagtaactaccatcatggtagcagcgcgcagaatacttccgcgcaacaggacagcgaagaaaccgaataaggtttcgggctgtttttttacacggggagccagcgatcctgcgttccccgctgatctatttagagggttatacgcttgtttgaccgttatgatgctggtgagcaggcggtactggtacacatctattttacgcaagacaaagatatggaagacctccaggagtttgaatctctggtctcttccgccggtgtcgaagcattgcaggtgattaccggtagccgtaaagcgccgcacccaaagtattttgtaggtgaaggtaaagcagttgaaattgcggaagctgtcaaagcgacgggtgctagcgtcgttctttttgaccatgccctgagcccggcgcaagagcgtaacctggagcgtttgtgcgagtgtcgtgttatcgaccgcaccggccttattttagatattttcgcccaacgtgcgcgtacccatgagggtaagttgcaggttgagctggcgcagctgcgccatctggctacgcgcctggtgcgtggctggacccaccttgaaagacagaaaggcgggataggtttgcgtggtccgggtgaaacccagctcgaaaccgaccgtcgtttgttgcgtaatcgcatcgtgcagatacagagccgcctggaaagagttgaaaagcagcgtgagcaggggcggcaaagccgtatcaaagccgacgttcctactgttagcctggtgggatataccaacgccggtaaatctacccttttcaatcgcatcaccgaagcgcgggtctacgcggcagaccagttgtttgccaccctcgacccgacgttgcggcgtattgacgttgcagatgtcggtgaaaccgtacttgcagataccgtagggtttattcgccacctgccgcacgatctggtggcggcatttaaagccacgttacaagagacgcggcaagccacattactgctgcacgtcattgatgcggcggatgtgcgtgtacaagaaaacatcgaagcggtgaatacggttcttgaagagatcgacgctcacgagatcccaaccctgctggtgatgaacaagatcgatatgctggaagatttcgaaccgcgtattgatcgggacgaagagaacaaaccgaaccgtgtctggctttccgcacagaccggagcggggataccacagctttttcaggctttgacggagcggctttccggcgaggtggcgcagcatacattgcgtctgccaccgcaggaagggcgtctgagaagtcgtttttatcagcttcaggcaatagaaaaagagtggatggaggaggacggcagcgtaagtctgcaagttcgtatgccgatcgttgactggcgtcgcctctgtaaacaagaaccggcgttgatcgattacctgatctaacggcgtagcgtctgaagcgtggagtcatatcctctggcgtcgaaagacaacagggatcaccgcataacaaatatggagcacaaacatggcgtggaatcagcccggtaataacggacaagaccgcgacccgtggggaagcagcaaacctggcggcaactctgagggaaatggaaacaaaggcggtcgcgatcaagggccacctgatttagatgatatcttccgcaaactgagcaaaaagctcggtggtctgggcggcggtaaaggcaccggatctggcggtggcagtagtagccaaggcccgcgcccgcagcttggcggtcgtgtcgttaccatcgcagcggcagcgattgtcattatctgggcggccagtggtttctataccattaaagaagccgaacgcggcgtggtaacacgctttggtaaattcagccatctggttgagccgggtctgaactggaaaccgacgtttatcgacgaagtcaaaccggtgaacgtggaagccgtgcgtgaactggccgcttctggtgtgatgctgacgagcgacgagaacgtagtgcgcgttgagatgaacgtgcagtaccgcgtcaccaatccggaaaaatatctgtatagcgtgaccagcccggatgacagcctgcgtcaggctaccgacagcgccctgcgtggagttatcggtaaatacaccatggaccgcattctgacggaaggtcgtaccgtgattcgtagcgatactcagcgcgaactggaagagacgattcgtccgtatgacatgggtatcacgctgctggacgtcaacttccaggctgctcgtccgccggaagaagtaaaagcggcgtttgacgatgcgattgccgcgcgtgaaaacgaacagcaatacattcgtgaagcagaagcgtataccaacgaagttcagccgcgtgcgaacggtcaggcgcaacgtatcctcgaagaggcgcgtgcgtacaaggcccagaccatcctggaagctcagggtgaagtggcgcgctttgctaaacttctgccggaatataaagccgcgccggaaattactcgcgagcgtctgtatatcgagacgatggaaaaagtgttgggtaacacccgcaaagtgctggttaacgataaaggtggcaacctgatggttctgccgttagaccagatgctgaaaggtggtaacgcccctgcggcgaagagcgataacggtgccagcaatctgctgcgtctgccgccagcctcttcctccacaaccagtggagcaagcaacacgagctccaccagtcagggcgatattatggaccaacgccgcgccaacgcgcagcgtaacgactaccagcgtcagggggaataacgatgcgtaagagtgttatcgcgattatcatcatcgtgctggtagtgctttacatgtctgtctttgtcgtcaaagaaggtgagcgcggtattacgctgcgttttggtaaggtactgcgtgacgatgacaacaaacctctggtttatgagccgggtctgcatttcaagataccgttcattgaaacggtgaaaatgctcgacgcacgtattcagaccatggacaaccaggccgaccgctttgtgaccaaagagaagaaagacctgatcgtcgactcttacatcaaatggcgcatcagcgatttcagccgttactacctggcaacgggtggtggcgacattagccaagcggaagtgctgttgaaacgtaagttctctgaccgtctgcgttctgaaattggtcgcctggacgtgaaagatatcgtcaccgattcccgtggtcgtctgaccctcgaagtacgtgacgcgctgaactccggttctgcgggtacagaagatgaagttactaccccggcggcagataacgccattgccgaagcggcagagcgcgtaacggctgagacgaagggcaaagttccggtcatcaacccgaacagtatggcggcgctgggtattgaagttgtcgatgtgcgtatcaagcagatcaacctgccgaccgaagtgtctgaagcgatctacaaccgtatgcgcgccgagcgtgaagcggtagcgcgtcgtcaccgtagtcaaggtcaggaagaagcggaaaaactgcgcgcgactgccgactatgaagtgaccagaacgctggcagaagctgagcgtcagggccgcatcatgcgtggtgaaggcgatgccgaagcagccaaactgtttgctgatgcattcagtaaagatccggacttctacgcattcatccgtagcctgcgtgcttatgagaacagcttctctggcaatcaggacgtgatggtcatgagcccggatagcgatttcttccgctacatgaagacgccgacttccgcaacgcgttaatataacgactgcggtacaggtcaataaagccaccgcatcctcagggatgtcggtggttttctttttctataaggataatgaatgaatagcacaatctggctggcgcttgccctggttttggtactggaaggtttagggccgatgctttacccgaaggcatggaagaagatgatctctgcgatgaccaatttgcccgataatattttacgtcgttttggcggtggacttgtggttgcgggcgttgtggtctactacatgttgaggaaaacgattggctgaacaaaaaacagactgatcgaggtcatttttgagtgcaaaaagtgctgtaactctgaaaaagcgatggtagaatccatttttaagcaaacggtgattttgaaaaatgggtaacaacgtcgtcgtactgggcacccaatggggtgacgaaggtaaaggtaagatcgtcgatcttctgactgaacgggctaaatatgttgtacgctaccagggcggtcacaacgcaggccatactctcgtaatcaacggtgaaaaaaccgttctccatcttattccaagtggtattctccgcgagaatgtaaccagcatcatcggtaacggtgttgtgctgtctccggccgcgctgatgaaagagatgaaagaactggaagaccgtggcatccccgttcgtgagcgtctgctgctgtctgaagcatgtccgctgatccttgattatcacgttgcgctggataacgcgcgtgagaaagcgcgtggcgcgaaagcgatcggcaccaccggtcgtggtatcgggcctgcttatgaagataaagtagcacgtcgcggtctgcgtgttggcgaccttttcgacaaagaaaccttcgctgaaaaactgaaagaagtgatggaatatcacaacttccagttggttaactactacaaagctgaagcggttgattaccagaaagttctggatgatacgatggctgttgccgacatcctgacttctatggtggttgacgtttctgacctgctcgaccaggcgcgtcagcgtggcgatttcgtcatgtttgaaggtgcgcagggtacgctgctggatatcgaccacggtacttatccgtacgtaacttcttccaacaccactgctggtggcgtggcgaccggttccggcctgggcccgcgttatgttgattacgttctgggtatcctcaaagcttactccactcgtgtaggtgcaggtccgttcccgaccgaactgtttgatgaaactggcgagttcctctgcaagcagggtaacgaattcggcgcaactacggggcgtcgtcgtcgtaccggctggctggacaccgttgccgttcgtcgtgcggtacagctgaactccctgtctggcttctgcctgactaaactggacgttctggatggcctgaaagaggttaaactctgcgtggcttaccgtatgccggatggtcgcgaagtgactaccactccgctggcagctgacgactggaaaggtgtagagccgatttacgaaaccatgccgggctggtctgaatccaccttcggcgtgaaagatcgtagcggcctgccgcaggcggcgctgaactatatcaagcgtattgaagagctgactggtgtgccgatcgatatcatctctaccggtccggatcgtactgaaaccatgattctgcgcgacccgttcgacgcgtaattctggtacgcctggcagatattttgcctgccgggcgaacagtgtgatacattgctgtgtcgggtaagccattacgctatccgacacagtgttaaatcctcgcttttttccttccccgaactgaaataaattagcgacacagcttgtggctggtttatcatcaatataaatgtattttttcccgatttcccttttgaggttgatgtgcagttaacgagtttcactgattacggattacgtgcgctgatctacatggcgagtttgccagaagggcggatgaccagtatttctgaagtgactgacgtctacggcgtctcccgtaatcatatggtcaaaataatcaatcaacttagtcgtgccggctacgtgactgctgttcgtggaaaaaatggcggcattcgcctgggtaaaccggcgagtgcgatacgtattggtgatgtggtgcgcgagctggagcccttaagcctggtgaattgcagcagtgagttttgccacattacacctgcctgtaggttgaaacaggcactttctaaggccgtgcaaagttttcttacggaactggataactacacgcttgccgatttggttgaagagaatcaaccgctttataaattattgctggtggagtgacgaaaatcttcatcagagatgacaacggaggaaccgagatgagtcaagatcctttccaggaacgcgaagctgaaaaatacgcgaatcccatccctagtcgggaatttatcctcgaacatttaaccaaacgtgaaaaaccggccagccgtgatgagctggcggtagaactgcacattgaaggcgaagagcagcttgaaggcctgcgtcgccgcctgcgcgcgatggagcgcgatggtcaactggtcttcactcgtcgtcagtgctatgcgctgccggaacgcctcgacctggtgaaaggtaccgttattggccaccgtgatggctacggctttctgcgggttgaagggcgtaaagatgatttgtatctctccagcgagcagatgaaaacctgcattcatggcgatcaggtgctggctcagccgctgggtgctgaccgtaaaggtcgtcgtgaagcgcgtattgtccgcgtactggtgccaaaaaccagccagattgttggtcgctactttaccgaagcgggcgtcggctttgtggttcctgacgacagccgtctgagcttcgatatcttaatcccgcccgatcagatcatgggcgcgcggatgggctttgtggtcgtagtcgaactgactcagcgtccgactcgccgcaccaaagcggtgggtaaaatcgtcgaagtgctgggcgacaatatgggcaccggcatggcggttgatatcgctctgcgtacccatgaaattccgtacatctggccgcaggctgttgagcaacaggttgccgggctgaaagaagaagtgccggaagaagcaaaagcgggccgtgttgatctgcgcgatttaccgctggtcaccattgatggcgaagacgcccgtgactttgacgatgcagtttactgcgagaaaaaacgcggcggcggctggcgtttatgggtcgcgattgccgacgtcagctactatgtgcgtccgagtacgccgctggacagagaagcgcgtaaccgtggcacgagcgtgtacttccctagccaggttatcccgatgctgccggaagtgctctctaacggcctgtgtagcctcaacccgcaggtagaccgcctgtgtatggtgtgcgagatgacggttagcagcaaaggccgcctgacgggctacaaattctacgaagcggtgatgagctctcacgcgcgtctgacctacaccaaagtctggcatattctgcagggcgatcaggatctgcgcgagcagtacgccccgctggttaagcatctcgaagagttgcataacctctataaagtgctggataaagcccgtgaagaacgcggtgggatcagttttgagagcgaagaagcgaagttcattttcaacgctgaacgccgtattgaacgtatcgaacagacccagcgtaacgacgcgcacaaattaattgaagagtgcatgattctggcgaatatcagcgcggcgcgtttcgttgagaaagcgaaagaaccggcactgttccgtattcacgacaagccgagcaccgaagcgattacctctttccgtagtgtgctggcggagctggggctggaactgccgggcggtaacaagccggaaccgcgtgactacgcggagctgctggagagcgttgccgatcgtcctgatgcagaaatgctgcaaaccatgctgctgcgcagcatgaaacaggcgatttacgatccagaaaaccgtggtcactttggcctggcattgcagtcctatgcgcactttactagcccgattcgtcgttatccagacctgacgctgcaccgcgccattaaatatctgctggcgaaagagcaggggcatcagggcaacaccactgaaaccggcggctaccattatagcatggaagagatgctgcaactgggtcagcactgtagcatggcggaacgtcgtgccgacgaagcaacgcgcgatgtggctgactggctgaagtgtgacttcatgctcgaccaggtaggtaacgtctttaaaggcgtaatttccagcgtcactggctttggcttcttcgtccgtctggacgacttgttcattgatggtctggtccatgtctctagcctggacaatgactactatcgctttgaccaggtagggcaacgcctgatgggggaatccagcggccagacttatcgcctgggcgatcgcgtggaagttcgcgtcgaagcggttaatatggacgagcgcaaaatcgactttagcctgatctccagcgaacgcgcaccgcgcaacgtcggtaaaacggcgcgcgagaaagcgaaaaaaggcgatgcaggtaaaaaaggcggcaagcgtcgtcaggtcggtaaaaaggtaaactttgagccagacagcgccttccgcggtgagaaaaaaacgaagccgaaagcggcgaagaaagacgcgagaaaagcgaaaaagccaagcgcgaaaacgcagaaaatagctgcagcgaccaaagcgaagcgtgcggcgaagaaaaaagtggcagagtgatcaataccctctttaaaagaagagggttagattgctgacaaaatgcgctttgttcatgccggatgcggcgtgaacgccttatccggcctacataatcacgcaaattcaatatattgcagagatcatgtaggccggataaacgtagtgcatcaggcaaaacgtaaacaacgagtacattaatgagcgaaatgatttacggcatccacgcagtgcaggccctgctggagcgcgcccctgaacgttttcaggaagtctttattttaaaaggccgtgaagataaacgtctgttaccgctgattcacgcccttgagtctcagggcgtggttatccagttggcaaaccgccaatatctcgacgagaaaagcgacggtgccgtgcatcagggcattatcgcccgcgtgaagccaggacgtcagtatcaggaaaacgatctgccggatctgatcgctagcctcgatcaaccgttcctgctgatcctcgacggcgtaaccgatccgcacaacctcggcgcgtgcctgcgtagtgcggacgccgcaggcgttcatgcggtgattgtgccgaaagatcgctccgcacagctcaacgctacggcgaaaaaagtagcctgcggcgcggcagaaagcgttccgctgattcgggtgactaaccttgcgcgcaccatgcgtatgttgcaggaagagaatatctggatcgtcggtacggcaggcgaggcggatcatacactctatcagagcaaaatgaccggacgcctggcgctggtgatgggtgcggaaggtgaaggtatgcgtcgcctgactcgtgaacattgcgatgagttgatcagcatcccgatggctggaagcgtttcttccctgaacgttagcgttgcgaccggaatttgcttatttgaagcggtgcgccagcgcagctaatttctcagaattatgaaaagccatccagatttggatggtttttttttgtctatagctggtaagataattacgtattgcaaatattcattttattaatatttaaacttaatctatatggaataatatatgacatggaatccgttggcgctagcgacggcgctgcaaactgtacctgaacaaaatattgatgtaacaaatagcgagaacgcattaattattaaaatgaatgattatggcgatttgcaaatcaatattctttttacttcccgccaaatgattatcgaaacctttatttgtccggtgagtagtatcagcaatccagatgaatttaataccttcttattaagaaatcagaagatgatgccgttgagtagcgtagggatctccagcgtacaacaggaagagtattacattgttttcggggcgttaagccttaaatcttctcttgaagatatcctgcttgagataaccagcctggtagataacgcattggatctggctgaaattacagaagaatatagtcactaattacaaggacgggtatttatgggaattttaaaaagtttatttacgctggggaaaagctttatctcccaggcggaagaatccattgaagaaacccagggcgtgcgcatgctggaacagcatattcgtgacgctaaagctgaactcgataaagccggaaaatctcgcgttgatctgctggcgcgggtgaaattaagtcacgataagctgaaagatttacgtgagcgcaaagccagtctggaagcccgtgcgctggaagcgttaagcaagaacgttaatccgagcttgattaacgaagttgctgaagaaatcgcgcgccttgagaatctcattaccgctgaagagcaagtgttgagcaatctggaagtctcccgtgatggcgtggaaaaagcagttacagcgacagcgcagcgtatcgctcagtttgagcagcaaatggaagtcgttaaagccactgaagccatgcagcgtgcacaacaggctgtaacaacctctaccgttggcgcatcttccagcgttagcacagcggcagaatccttaaaacgcctgcaaacgcgtcaggccgaacgtcaggctcgcctggatgctgccgcacagttggagaaagtcgcagacggtcgcgaccttgacgaaaagctggcggaagccggaattggcggtagcaataaaagtagcgcccaggatgtattagcaagactgcaacgccaacagggcgagtaatttttttgccagcctcgctaaaaggctggcaactattttaaggataaaatatgtctggttttttccagcgtctgtttggcaaggataataagccagctatcgctcgtggtccgctgggacttcatctcaatagtggctttacgctcgacacgttagcgtttcgtttgctggaagatgaattgctgattgcgctgccgggtgaggaatttacggtagccgccgtcagccacatcgatctgggcggcggtagtcagattttccgctactacactagtggcgatgagtttctgcaaatcaataccaccggcggcgaagatattgatgacattgatgatatcaagctctttgtctatgaagagagctacggtatcagtaaagagagtcactggcgcgaggcgatcaacgccaaagcgatgggagcaatgaccttaaactggcaggaaaaacgctggcagcgattttttaacagcgaagaaccgggaaatatcgaacccgtctacatgctggaaaaagtagaaaatcaaaaccatgccaaatgggaggtccataattttaccatgggctaccaacggcaagtaaccgaagatacttacgaatatttgctgctaaatggtgaggaatcttttaacgatctcggcgagccagagtggttatttagccgcgcgttgggtgtcgatatcccgctgacaagtcttcatattattggttaattacaaggacgtttacaatgcatatactggatagtcttcttgcctttagcgcctatttttttattggcgtggctatggtgattatttttctgtttatctattctaaaattacaccgcacaacgaatggcagttaatcaaaaacaataataccgcggcgagtctggcgttcagcggtacattgttgggttacgttatccccttatccagtgcggcaatcaatgcggtgagtattccagactatttcgcctggggcgggattgcactggtgattcagttactcgtttttgctggtgtcagactttatatgcccgcattaagcgaaaaaattattaatcacaataccgcagcaggaatgtttatgggaaccgccgcgctggctggcggtatttttaacgcagcttgtatgacatggtaatggacgatcatggccagaaaacgcaaaagtagaaataacagtaaaattggtcacggagcgattagtcgcattggtagaccgaataatccttttgaaccgtgccgcaatcgctacgcacaaaaatacttaacgttggcgctaatgggcggtgccgcttttttcgtattgaaaggttgtagcgatagtagcgatgtcgataacgacggcgacggaacgttttacgcgacagtgcaggattgtattgatgacggtaataatgccgacatttgcgcgcgtggctggaacaacgccaaaacggcattttatgccgatgttccgaagaatatgactcagcagaactgtcagtctaagtacgaaaattgctactacgacaatgttgaacagagttggatcccggtcgtttctggatttttgttaagccgggttattcgtaaagatcgcgatgagccgtttgtttataacagcggcggttcctcttttgctagccgcccagtctggcgcagcacttctggtgattactcctggcgctccggttctggcaaaaaagagtcttactctagcggcggctttaccaccaaaaaagcgtctaccgtttctcgcggcggctatggtcgttcttccagcgcccgtgggcattggggaggctaatcatgctgagacacaacgttcctgtgcgacgggatctggaccagatcgccgctgacaacggtttcgactttcatatcatcgacaatgaaatctattgggatgagagtcgggcttaccgttttactctgcgccagattgaagagcagatcgaaaaaccgactgcggaactgcatcagatgtgccttgaggtggtggatcgcgcggtaaaagatgaagagatcctgacgcaactggcgatcccgccgttgtactgggatgtgatcgctgaaagctggcgcgcccgcgatcctagcctgtatggacggatggattttgcctggtgtggcaatgcgccggtgaagctgctggagtacaacgccgatacgccaactagtttgtacgagagcgcttattcccagtggctgtggctggaggatgcccggcgcagcggcattattccgcgtgatgccgatcagtacaatgctattcaggaacgcctgattagtcgctttagcgagctttacagtcgggaaccgttttatttttgctgctgtcaggacaccgatgaagacaggagtaccgtgctgtacttgcaggactgcgcccagcaggcagggcaggagagccggtttatctacattgaagatctcggtttgggcgtcggcggcgtactgaccgatcttgatgataatgtcatccagcgtgcatttaagctgtatccgctggagtggatgatgcgtgacgataacggtccgctgctgcgcaagcgtcgcgagcaatgggtggagccgttatggaaaagtatcttgagtaataaagggctaatgccgctgctttggcgcttcttccctggtcatcctaatcttcttgcgtcctggttcgatggcgagaaaccgcagattgccgctggcgaaagctatgtgcgtaaaccaatctatagccgcgaaggcggcaacgtcaccatttttgacggcaagaataacgttgttgaccacgctgatggtgattacgccgatgaaccgatgatctaccaggcgtttcaacctctgccgcggtttggcgatagctacacactcatcggtagctggattgtcgatgatgaagcgtgcggaatggggatccgtgaagataacacactgatcaccaaagacaccagtcgtttcgttccgcattacattgctggataagaatgttttagcaatctctttctgtcatgaatccatggcagtgaccatactaatggtgactgccattgatggagggagacacagtgcactggcaaactcacaccgtttttaatcaacctataccattaaataacagcaacttatacctgtctgatggcgcgctctgcgaagcggtaacgcgtgaaggtgctggctgggatagcgattttctagccagtattggtcagcagttaggaacggctgaatcccttgaactggggcggctggcgaatgtgaatccgcctgaattattgcgctacgatgcgcaaggacgccgtctggacgatgtgcgttttcaccccgcctggcacctgctgatgcaggcgctatgtaccaatcgggtgcacaatcttgcctgggaagaagacgctcgctccggcgcatttgtggcgcgcgcggcgcgttttatgttacatgcgcaggttgaggcagggagcttatgtccgataaccatgacctttgccgccacgccattgttgttacagatgttacccgcgccgtttcaggactggaccacgccgctattgagcgatcgctacgattctcacttattgccaggtgggcaaaaacgcggtttgttgattggcatgggaatgacggaaaagcagggcggttccgatgttatgagcaacaccacccgtgcagagcgtctggaagatggctcttatcggctggtggggcataaatggtttttcagcgttccgcaaagcgatgcgcatctggtgctggcgcagaccgcgggtggtctgtcctgcttttttgtgccgcgctttttgcctgacgggcaacgcaacgcgattcgcctcgagcggctgaaagataagctgggtaatcgctctaacgccagttgcgaagtggagtttcaggatgccattggttggttgttggggctggaaggggaaggaattcgtctgatcctgaaaatgggtgggatgacgcgttttgattgcgccctgggtagccatgccatgatgcgccgtgcatttagcctggcgatttatcatgcacatcaacgccatgtttttggtaatccattgatccaacagccccttatgcgtcatgtcttaagtcgcatggcacttcagcttgaagggcaaacggcgttgctgtttcgtcttgcgcgagcgtgggaccggcgtgccgatgccaaagaagccctgtgggcgcgtttatttacgcctgcggcaaaatttgtgatctgcaaaagaggtatgccgtttgtggccgaagcgatggaggtgctgggcggcattggttattgcgaggagagtgagctgccgcggctttaccgggagatgccggtaaacagtatttgggaaggttccggcaatattatgtgcctggatgtgttgcgcgttctcaataagcaagcgggcgtatacgacttattgagcgaagcatttgtggaagtgaaagggcaggatcgctattttgatcgcgcggttcgtcgtttacagcagcagctgcgtaagccagctgaagaactggggcgagagattactcatcagctattcctgctgggctgcggtgcgcaaatgttgaaatatgcttctccgccaatggcgcaggcgtggtgtcaggtgatgttagatacgcgcggcggcgtacggttgagtgagcagatccagaatgatttattgctgcgggcgacggggggagtgtgtgtgtaagcgtatacgactgatgcgacgctggtttcgattaactaaatgaaatatgtgaaaattgtaggccggacaaggcgctcgcgccgcatccggcattgttcatttgctgtagatgacactcatgcatacagtatcgcctgtacgcgccagttatcaggctgctggtcttcgtacatggtaataatgcggtaccaactcgcaccttgttcatcggcctttaacgccacgatacgttccacgtcctgcggatccccactaatattgctaacactgatctgacctatttcattcaggcccgtcacgcagtcagcactggcgaattctgcagactgtgccgtggcgctcgcaggataagtcactaattgcaggctgggactggcaagtaattgtttcatcgtcagctccatttttcgtttccccacatgttgcagggcattccatcgcggtaataaacgcccaggcttccagccggtaatttattgtgcacaggtaaacgcatagggacgcaaagcaatgtaaagctgactatgtaagttgtctgatttatttacggtacaaaatggcttgactataccactgtcctgtcacgatggtttcgtccaccatgacgacaacgtaataatcagcttttgcagcgacagctttcgctttgatttctgctaatgcgtcatccggagaaccccgaaccatcgtgcttacgctacctattcgctgtaacccttgcgtctggtcgcggcgaatctcttgcggatggtccgttactggcggtgctggctgtggcgtaccttgcagtgcgctacaggcacttaacatcaacaccaataataaactggcaaaccggtaaataacgctattacgtttcctgctaaccatagtgtagtgccttattaatttaactttgggggaatgttcccgaattgttacctggtacgcgattttcgaatgaaaacgtgacgaaagcgtaacccacatctcaacattatgaactaataccgccagcagaaacttgtgctaaggatttcttcatgtcataccagacaaaaaggagagacagatgattgaaatagaaagtcgcgagctggcagatattcccgttcttcatgcttatcctgtcgggcaaaaagataccccgttaccgtgcgtaattttttatcacggctttactagttccagtctggtgtatagctattttgccgttgcgctggcgcaggctggtttgcgggtgatcatgccggatgcgcccgatcacggtagccgttttagtggtgacgcagcgcggcggttaaatcaattctggcaaatcttgctacaaagtatgcaggaattcactactttacgtgcggcaatagccgaagaaaactggctgcttgatgaccgtctggcagtcggtggcgcgagcatgggcgcgatgacggcactggggattaccgctcgccaccccacggtgagatgtaccgccagcatgatgggaagcggctattttacaagtctcgcccgtagtctgtttccaccgctgatacctgaaacggcagcacagcagaatgaattcaataacattgtcgcgccactggcagagtgggaagcgacaaaccacctggaacaacttagtgacagacctctactgctgtggcatggcctcgacgatgacgttgtgcctgccgacgaaagtctacgtttgcagcaggccttaagcgagacgggacgggataaactgctaacctgtagttggcagccaggcgtgcgtcaccgcattacgcctgaggcgttagatgctgccgtgacatttttccgccagcatctttaaacacgcagaatgctgaccccttgcgcttccagttgttgcaggatttccgggttagcatttttgccggtgataagcatatcgatttgatcggcacggctaaaaagcattcccgcgcgttcgccaatcttactgctatcaaccagtaccaccagtttccctaccacgctcagcatcttctgctctgccattgctgtcagcatatcggttttatacaacccttctgcggtcagcccttttccgctggtaaacatccagtgcccggcatagagactgttttcgctgccctgcgggcttaaagtgatggactgacttttgttgtactgtccgcccataatgatcacgctgtcatgttcttgatcgatcaggtaatttgccagcggtagataattagtgatgatttgcactggcttgccacacatttcccgcccaagcagaaacgcggtggagccgcagttgatgactacgctttcgcccggattaaccagctggctggccgctttagcgatacgtactttttcatcgtgattctgcgcctgatgcagattcatcggcgtccagcgcgggcgctgttgggtaatagcttctgcgccattgcgcacttttttcagtttgccgctttcgtcaagtttattgatatcgcgtcgcgcagtggcagggctaattcccagacgctcaacgactttctcaacggtcacaaagcccaattgtgcgagcatttccaggaggatttgatgtctttgtgcttcagtcatgagctattccgataaaatttgatttttttagatgatatttgaaatagccaggaaatactacgccggatagcgcgaacttctccacgctacccggtataaacgacagattacaggaaactcttgaacggcagatccggttcaatagtgaagcaatcatcgaaaccgcgcggatagtggtactcgaagttgtctttatccagcggccaggtaaatttgccacccacctgccagataaacggcttgaagccatacttcaggcgatcttttttcatctcccacagcacgcggatctcttgcggatcggcctggaagttactccagatatcgtggtggaacgggatcactactttcgcattcagcgcttcacccatacgcagcatatcggcgctggtcattttgtcggtgataccgcgcgggttttcgccgtagcttcctaacgccacgtcgatctgatgttcgttaccgtgcttcgcataatagttagagtagtgggagtcgccgctgtgatacagggagccgccaggcgttttgaacaggtagttcaccgcgcgatcgtccatgccatctggcagtacgccagccgctttttgatcggcaggcagggtgatcagtgcagtacggtcgaaagcatcaagcgcatgaatttcaatgtctttcacttttactacatcgcccggtttgaccacgatgcaacgctctttcggtacgccccagccaatccacaaatccacacaggttttcggtccgataaacggtacgtcatctgcacaattctgcatcacggcagcagcgacgttaacgtcgatatgatcgttgtgatcgtgagtcgccagtaccgcgtcgatctggcgaatcgcaaacggatcaagaacaaacggggtggtacgcaggtttggctgcagttttttcacgccagccatgcgctgcatctggtgaccctgtttcattaacgggttaccgtgactttgtttgccagtgccgcaccagaaatcaacgcaaacgttggtgccaccttcgcttttcaaccagatcccggtgcagccaagccaccacatcgcaaatgtgccaggagcgacctgttcttgttcaatttcttcattcaaccagctaccccactccgggaaagtgctcaggatccaggattcacgggtgatacttttcactttactcatcgccatttaccttcatgatagttcaattcgaatcaatatgtgattggttttgattaatcctgacactattttttcaggaaggcaatgaccattttttgactttttgccagggaagttgttgttgattttgagtatggaaagatttaatggaatgtgtaattcaattaactaaatgaatttaaatggataattgtttcgttgtgtgaatcccactctatccatgtggaattatttgcgggtcgcgtcacatttaatcataaataatcttgttgtgattacttttgaaaattagagtgagtgcacaacattccgggtgtgtggaatacccggttacctcttcttcaggagatcgttatggagatcctctacaacatctttaccgtgttttttaaccaggtcatgaccaatgccccgttgttgctgggtattgtgacctgtctgggctacatcctactgcgcaaaagtgtcagcgttattattaaaggcacgattaaaaccataattggtttcatgttgttgcaggcagggtccggcatcctcaccagcaccttcaaaccggtggtggcgaaaatgtccgaagtctacggcattaacggcgcaatttccgatacctacgctagtatgatggcaaccatcgaccgcatgggcgatgcctatagctgggtgggttacgccgtattgttagcgctggcgctgaacatctgttacgtgctgttgcgtcgcattaccggcattcgcacaatcatgttgaccggccacatcatgttccagcaggccgggttgattgccgttacgctgtttatcttcggctactccatgtggaccaccattatctgtaccgcgattctggttagcctctactggggcatcacttccaacatgatgtacaagccgactcaggaagtgacggatggctgtggtttctccatcggtcaccagcagcagtttgcaagttggattgcctataaagtcgcgccgttcctcggcaaaaaagaggagagcgttgaagacctcaaattgccgggctggctgaacattttccacgacaacatcgtctccacggcgattgtgatgaccatcttctttggtgccattctgctctccttcggtatcgacaccgtgcaggcgatggcaggcaaagtgcactggacggtgtacatcctgcaaactggtttctcctttgcggtggcgatcttcatcatcacgcagggtgtgcgcatgtttgtggcggaactctctgaagcatttaacggcatttcccagcgcctgatcccaggtgcggttctggcgattgactgtgcagctatctatagcttcgcgccgaacgccgtggtctggggctttatgtggggcaccatcggtcagctgattgcggttggcatcctggtcgcctgcggctccagcatcctgattattcctggctttatcccgatgttcttctctaacgccaccatcggcgtgttcgctaaccacttcggcggctggcgtgcggcgctgaagatttgtctggtgatggggatgatcgaaatctttggttgcgtctgggcggtgaaactcaccggtatgagtgcctggatgggcatggcggactggagcattctggcaccgccgatgatgcaaggcttcttctccatcggtatcgcctttatggccgtcatcattgtaattgcactggcttatatgttcttcgctggccgcgcgctgcgcgcagaagaagatgcagaaaaacaactggcagaacagtctgcttaataaggagttttgattatgaccgtacgtattctggttgtgtgtggcaacggacaaggcagttccatgatcatgaagatgaaagtggaccagtttttaacccaaagtaacattgaccatacggtaaacagctgcgcggttggcgagtacaaaagcgagttgagtggcgcggatatcatcatcgcttctacgcacattgcgggcgaaatcaccgtgaccggcaacaaatacgtggttggcgtgcgcaacatgctctctcctgccgactttggcccgaaactgctggaagtgatcaaagagcatttcccgcaggatgtgaagtaaggacgcgccatgaaattacgtgatagcctggcggaaaataaatccatccgcctgcaggctgaagcagagacatggcaggaagcggtgaaaatcggcgttgacctgctggtggcggcagatgtggtagagccgcgttactaccaggcgattctggatggcgttgaacagttcggtccttatttcgttatcgctccgggcctggcaatgccgcacgggcgtccggaagagggcattaagaaaaccggtttctctctggtaacgctgaaaaagccgctggagttcaaccacgatgacaacgatccggtggatatcctcatcaccatggcggcggtcgatgccaatactcaccaggaagtgggcatcatgcagatcgtcaacctgtttgaagatgaagagaattttgaccgtttacgcgcctgccgtaccgagcaggaagtactggatctcattgaccgcaccaacgcggcagcttaagaaggaattgaacatgagtttaccgatgttgcaagtcgcgctggacaaccagactatggatagcgcctacgaaaccactcgcctgattgccgaagaagtcgacattatcgaagtgggcaccattctgtgcgtgggcgaaggcgtgcgtgcggttcgtgacctgaaagcgctctacccgcacaaaatcgtactggcagacgccaaaattgccgatgcaggcaaaatccttagccgtatgtgcttcgaagccaacgctgactgggtgacggtaatttgctgtgcggatatcaacaccgccaaaggcgcgctggacgtggcaaaagagtttaacggcgacgtgcagatcgaactgaccggttactggacctgggaacaggcgcaacagtggcgcgatgcaggcattgggcaggtggtttatcaccgcagccgtgacgcgcaggccgcaggcgtggcgtggggcgaagcggacatcaccgcgatcaaacgtctttccgatatgggcttcaaagtcaccgtcaccggaggcctggcgctggaagatctgccgctgttcaagggtattccgattcacgtctttatcgcgggccgtagtatccgtgatgccgcttctccggtggaagccgcacgtcagttcaaacgttccatcgctgaactgtggggctaaggagcggatatgttgtccaaacaaatcccgcttggcatctatgaaaaagcgctccccgccggggagtgctggctggaacgcctgcaactggcaaaaacgttaggcttcgattttgtcgaaatgagcgtagatgaaactgacgatcgcctgagccgcctcaactggagccgcgagcagcgtctggcgctggtcaatgcgattgttgaaaccggcgtgcgcgtgccgtccatgtgcctttctgctcatcgtcgtttcccgctgggcagtgaagatgacgcggtgcgggcgcaggggctggagattatgcgtaaagctatccagttcgcccaggatgtcggtattcgcgtgatccagctggcgggctatgacgtttactatcaggaagccaataacgaaacgcgtcgtcgtttccgtgacggcctgaaagagagcgttgagatggcaagccgcgcgcaggtgacgctggcgatggagatcatggattatccgttgatgagctccatcagcaaggcgctgggatacgcgcactatctcaacaatccgtggttccagctctacccggatatcggcaacctgagcgcgtgggacaacgatgtgcagatggagttgcaggccggaatcgggcatatcgtcgcggtacatgtgaaagacaccaaacctggcgtcttcaaaaacgtgccgtttggcgaaggtgtagtggatttcgagcgttgtttcgaaacgctcaaacagagtggctattgcgggccgtacctgattgagatgtggagcgaaacggcggaagacccggcggcagaagtggcgaaagcgcgtgattgggtgaaagcgcgcatggcgaaagcgggcatggtggaggcggcataatgcaaaagctaaaacagcaggtatttgaagccaacatggagctgccgcgctacgggctggtgacctttacctggggcaacgtcagcgctatcgaccgcgaacgcgggctggtggtgatcaagcccagcggcgttgcctacgaaaccatgaaagcggccgatatggtggtggttgatatgagcggcaaggtggtggaaggggagtatcgcccatcttccgacactgcgacgcatctcgaactctaccgtcgttacccgagccttggtggcattgtccatacccactccactcatgccaccgcatgggcgcaggcggggctggcgatcccggcgttaggcaccacgcacgccgactacttctttggcgacattccgtgtacgcgcgggttaagcgaagaagaggtgcagggcgagtatgaactgaacaccggcaaagtgattatcgaaacgctgggcaacgccgagccgctgcatacgccgggaattgtggtgtatcagcacgggccgttcgcctgggggaaagatgctcacgatgcggtgcataacgcggtggtgatggaagaagtggcgaaaatggcgtggattgcccgcggcattaacccacaactcaatcacatcgacagcttcctgatgaataaacacttcatgcgtaaacacggtcctaacgcttattacgggcagaagtaaaacacgcgctgcggaaatttccttcctcgggagataactggtctaattccgcagccgtttttcaaaaaaaagccccctgcgaagggggcaaagcaaactatggcaatgtttcgttggttatacctggtgttagcgataaatatccgcgctggcgtgcatattgccgttactccccggttcccgcatcagaattacgtggtagtacgttgcgccttgcgcatctgtttcttcatttaatgcctgacgtgcttcgctttcagtggcgaaattatgattgatataaatcacgcctaagctttgcacatcgtccatatttctggcctggtggttattaatttcaatggctgcccatgtatttgcacttagcaaaagcacagccagaagggctaaaacacgactgaacatagatacctcctcgacggctgactttgtgtgctctcctctgtgatgatcttctgatttaattttaatcaatgataaagaagttgatggtgaccatttctgatgcagttgttcaaaaaaacaccatgatgaagtgtgatgaacttcaaatcagcgtgttagaggttaattgcgaaaggggagatttatttcggctctgcccttgagtttagcgaggcatacaagtactataacgcgtcatttttcagccgacctttaacacgttccttgcctccccgggattcggctgacccagacaggaggctgaataatccgtaaggagcaattcgatgcgtcattacgaaatcgtttttatggtccatcctgaccagagcgaacaggttccgggcatgatcgagcgctacactgctgccatcactggtgcagaaggcaagatccaccgtctggaagactggggccgccgtcagctggcttacccgatcaacaaactgcacaaagcacactacgttctgatgaatgttgaagctccgcaggaagtgatcgatgagctggaaactaccttccgcttcaacgatgccgttatccgcagcatggttatgcgtaccaagcacgctgttaccgaagcatctccgatggttaaagcgaaagacgagcgccgtgagcgtcgcgatgatttcgcaaacgaaaccgctgatgatgctgaagctggggattctgaagagtaatttctgatgaccaaccgtctggtgttgtccggcaccgtgtgcagggctccccttcgaaaggtcagtccaagtggaattcctcactgccagttcgtgcttgagcatcgttctgtgcaggaggaagccggctttcaccggcaggcgtggtgtcaaatgcccgttattgttagcggacacgaaaaccaggccattactcacagtataacggtcggcagtcgcataaccgttcaggggttcattagttgccacaaggcaaagaacggactgagcaaaatggttttgcatgccgagcagattgaattgatagattctggagactaaccatatggcacgttatttccgtcgtcgcaagttctgccgtttcaccgcggaaggcgttcaagagatcgactataaagatatcgctacgctgaaaaactacatcaccgaaagcggtaagattgtcccaagccgtatcaccggtacccgtgcaaaataccagcgtcagctggctcgcgctatcaaacgcgctcgctacctgtccctgctgccgtacactgatcgccatcagtaatcggtcacggtccattaatacgactttgagaggataaggtaatgcaagttattctgcttgataaagtagcaaacctgggtagcctgggtgatcaggtaaacgttaaagcgggctatgctcgtaacttcctggtaccgcagggtaaagctgttccagctaccaagaaaaacattgaattcttcgaagctcgtcgcgctgaactggaagctaaactggctgaagttctggcagctgctaatgctcgcgctgagaaaatcaatgcactggaaactgttaccatcgcgtctaaagctggcgacgaaggtaaactgttcggttccatcggtactcgcgacatcgctgacgctgtaactgcagctggcgttgaagtggctaagagcgaagttcatctgccgaacggcgttctgcgtaccactggcgaacacgaagtgagcttccaggttcacagcgaagtattcgcgaaagtgatcgtaaacgtagtagctgaataattcgttattcaacgagacgtaaaaacgccgaccattggtcggcgttttgctttctatttttcgtcaggtattagtttcgcaagtagatccattcaccattctcttgtgtccataagtcaggatggtttgctggcgttagatacatacgagcgcaactgatgtctcgctcctgcggcactcgctcgaaacccaaaccgctgtagattgcggcactactacttaaggaacgcagaccaattttcaaatcatggggtaaatcagaatacgcgtttagcaatgcagcaatgatgaatccgagggcattagaaacgcctgtaacagtgcgaagttggtcgatataaagatcgattgttggtagttcagaactccagcaattaggcatttgggcaggaagggttacaacgtatcctatcgtttggccggtatagtctggagtaccataaccaggtcccaaaaccacttcgtgtattgtgtatttactgttgggttcgaaggattcgacatcttgcaataaatatttcagttctgcggttaacctcgcacccgcgtaagctttattgtatttctgggcgtgaatattatctaatgtagcttcatggttccatccaaaagaattatcaccattcattgtgattccatcgtaagcattacacctcgtcgctaacttattgaatgcttgccagtcactgagatctagtttgtggatctcaacagtacgtctgccatcgcaattatgatctcttccacgattactaagtaatgtagcgcgtgcgtattgatgaaattttaattttactggtttgtcggtggagctaaaacgagataaatatgcaggaaaactataaatagtcgttggtaatgtcattgtaatgttacctgtttaatgtttttataaatatcgcagctgaatgttcacagaaaaaaatcgatattaataaaaataagtttgttttctgaagtggtgaaaatagcggatggtgaaagatattaatatcaaaaatcgctcattatggatataacgatgcacccggggagaaaatgacttccacgccttacaccgtacattcttgttgtgcggtatgtaattattctacgctgtcggtatcggtgtattcgttaatcagcaggttagccagccacaaaaagccattgagaaaattattgattttacatgggattattatattgctaatccttggtttttaaaaattgtgcatagtgaaaatcaaagtaaaggtgtgcattatgcaaaaagtcagcgtctcttagaaattaaccatgcgcacttgcagttaatggaatccttattggatgaagggaagaaacacaatatttttaagccagatatcgacccattgcaggtgaatattaatattgctgcgcttggcggatattatttgatcaaccagcatacgcttggcctggtttatcacatcagtatggttagtccccaggcactggaagccagacgtaaggtcatcaaagagacaatccttagctggcttttggttgaccctagttctaccgcgcacgaataattaccgcgcacgaataaaactgccatccggctggcgggtgaacaggacctgttgattattccccgtatcaatggttaagcccgtcaccacgccgctggcgttctggcggattttcaccatctgcccgttttgcaaattactcagcggcttacccgcgccttctacctgcgccattgcatagacatcggtagcgggcagtccgtggtcgcggaacagctgcgccatcgttttaccgggttcgacacggtaagagcgccattgattatcaattccgctatctggctggaatggttgcgtttgggtagtttgcggctgctcttctggctggccttcctgtataggttctggagcgaccggagccacctgatcaggaccattttgtggggtaactaattgcgcccgcagctgttcttctgtcggcggttgactttggctctgaatatctaactgcgcttcacgcgtcaccaccggcgcgttgggcgtatcatcagatggaagcagaaatccgaccaccaatacaatggcggcaataatgatcccccgacgatgcatcggcggcagcgggtccatgaagcgaaaattgtccggcgcgtgccagactttctccagggttggttttagttcaaagcgcccgggcatggtttcctcctgctccgcgtcttgttcctcaatcatagcctatgaataagctaacgctatgatgtccgtggtaaacccgcctttattatattcatacgggatattgctattgtttctttttccctgggatttgtcatcattcccgcgacaaagttttacccaaagaagtgtggctgatatgctgcccgctactttataccctaagaaaggaaatacgatgaccaccccaacttttgacaccatcgaagcgcaagcaagctacggcattggtttgcaggtagggcaacaactgagtgaatctggcctggaagggctgctgccagaagcactggttgcaggtattgccgatgcgctggaaggcaaacatccggctgttccggttgatgtggtgcatcgcgcgctgcgtgaaatccacgagcgcgccgatgccgttcgtcgtcagcgtttccaggcgatggctgctgaaggtgtgaaatacctggaagaaaacgccaaaaaaagaaggtgtgaatagcaccgaatctggcctgcaattccgcgtgatcaaccagggtgaaggcgcaattccggcacgtaccgaccgcgttcgtgttcattacaccggtaaactgatcgacggcaccgtgtttgacagctccgttgctcgtggtgaacccgctgaattcccggttaatggcgtgatccctggctggattgaagcactgactctgatgccggtaggttctaaatgggaactgactatcccgcaggaactggcatatggcgagcgcggcgcaggcgcatccatccctccgttcagcaccctggtgtttgaagtcgaactgctggaaatcctctaagcagcgcattctgttcccctcgaacgagaggggagcaggcattcagcaataaacccttcagtttgccaaacggcgctattttgtgttgcaaagaccccgtaagcgtgtatttttgtgagctgtttcgcgttatcaccgtgatatgacactcactttaaacataaaattaacattagatctaaatcttagtattcatcccgcgtattgttacctaatatcgatgagtcccgatacagattcgtcgtatcatagactgactaaaggccgtagagcctgaacaacacagacaggtacaggaagaaaaaaacatggtagatcaggtaaaagtcgttgccgatgatcaggctccggctgaacagagcctacggcgcaatctcacaaaccgacatattcagcttattgccattggcggtgccattggtacggggttgtttatggggtctggcaaaacgattagccttgccgggccgagcatcattttcgtttatatgatcattggttttatgctctttttcgtgatgcgggcaatgggggaattgctgcttagcaatctggaatacaaatcttttagtgacttcgcttccgatttactcgggccgtgggcaggatatttcaccggctggacttactggttctgctgggttgtaaccggtatggcagacgtggtggcgatcacggcttatgctcagttctggttccccgatctctccgactgggtcgccagcctggcggtgatagtgctgctgctgacgctcaatctcgccaccgtgaaaatgttcggtgagatggagttctggtttgcgatgatcaaaatcgtcgccattgtgagcctgattgtcgtcggcctggtcatggtggcgatgcactttcagagtccgactggtgtggaagcgagtttcgcgcatttgtggaatgacggcggctggttcccgaaaggtttaagtggcttctttgccggattccagatagcggttttcgctttcgtggggattgagctggtaggtacaacagctgcggaaaccaaagatccagagaaaagtctgccacgcgcgattaactccattccgatccgtatcattatgttctacgtcttcgcgctgattgtgattatgtccgtgacgccgtggagtagcgtagtcccggagaaaagcccgtttgttgaactgttcgtgttggtagggctgcctgctgccgcaagcgtgatcaactttgtggtgctgacctctgcggcgtcttccgctaacagcggcgtcttctctaccagccgtatgctgtttggtctggcgcaggaaggtgtggcaccgaaagcgttcgctaaactttctaagcgcgcagtacccgcgaaagggctgacgttcagctgtatctgtctgctcggcggcgtggtgatgttgtatgtgaatcctagtgtgattggcgcgttcacgatgattacaaccgtttccgcgattctgtttatgttcgtctggacgattatcctttgcagctaccttgtgtatcgcaaacagcgtcctcatctacatgagaagagcatctacaagatgccgctcggcaagctgatgtgctgggtatgtatggcgttctttgtgttcgtggtcgtgttgctgacactggaagatgacactcgccaggcgctgctggttaccccgctgtggtttatcgcgctggggttgggctggctgtttattggtaagaagcgggctgctgaactgcggaaataaccgcattatcatgctggatggcgcaatgccatccagcttttagatcactcacccgccagcgcgcgtgggaacagtacattgttttccagactgatgtgatccatcaggtcatcaatcagttcattaatgccgttatacatcgctttccaggtggtgcaggcttctggcggcggtgtgacgttattggtggtgtgtttaatcacttccagcagttcgcccgcttcatcgtgctcgctttccattacgctgattggccccattgcctggctgcccatgccttgtttgatcatcgggaagaggatctgctcttctttcatcatgtggctggaaagctcttcatgcagcatggtcaggtattttgtcagcccttttggcacgctcggtttgtcggcgtgaacgcgctcgactttagtcgcttgcagaatcagctccggcagttgctcgcggtgacgatcgtggtagcgcacgatgatatggtcgatgatttctgccagcggggcgctacgccagtctttctcaatcggttgttcagcgagctttgccagttcagcttcaatgacctcaacatccagttctttacgtgccgccgcgcgcgccagcgtctgcttaccgccacagcagtaatccatatcatatttacgaaacagagcactagcgcgaggaatagagagcgccagttcacctaaaggttggtcgcgataagccatagctgatacctcattcttaataagataagatgtattttaaatgcatctttaaggcaaaagctataacccttacgtagcagaggcttatttaactcactgccagcgtgtcaactttcactgacagattcagttaaaggtttttctggttttgctctgaccgcgatgaccacgccaatcactaacagcgcgataccgctcagcgtcattagcggcggcatttgctggcggagtaaaaaggtgtacagcaaacctgccagcgtttcgaaaacaatcagcggcccgagaatcactgtcggtaatagctggctggcgacgttccagcagagtgcgccaacccaactgcaaagcacggctatcgcaaccatcagactaataaacaccagcggacgggggccaaagggtagggagaagtccggcgtttgcgtattcagccagtaacaagcgacgagatagccgataagactaaccggcagtgtgaccagcgcctgcgctgttgcccacatcatcggatgtttgtcgggattttcccgcagccagcgggcgttgcgcagggcataccacgcccagcagaccacggaaactaacgccagcacgatgccagaggtataacgtgcccagtcaaaatcggggagtccgtggtttaactcagcaatattcacacacgccaggccgatgccaatacaaatcagtgctggggcgagttttccccacgcgagtttgccgtcgcgctggctataaagcagattggcaaagacaggaatgaccaccggcagggtgccgataatcatcgtggaaacaggcgcgccagtacgttgaatggcactggcaaggcagaagtaatagatgaggttgcccatcatagtgagcatcaaggcggtaagccagtcgcgacgcgccaactgacgcagacgcacgcgtcccagccaggcaatgggcagcgcaattaaccctaacgccagataacgccccatgctctgcaacatcgccgggtattccggcacgatcaacggcccgacaaaaataagcccccacatcaaccctgctaacagggcgtacagcacgccgctaatcattactggcatccattgatctgtcagaagaaagttcaggaagcagacatgattgctcccggcatcccgtcattatcagagaggatgcgggaggatgccactttaattaattagttattaacattaaaaagatggcttacgctttcggctaacgttgtcgttgggtggccaatcaatttgctaagtgttttgctgtcatcaaacagaccgcctttgcttgcgccaacgtcagaatccgccagcatatccgccagtccgtcgggcagtccgacgcttttcagtgccgcggcgaaatcggcttcgctcagattttgataggtaacctgtttgccgctctgtttggtcagctctgccgctaactgtgtcaacgtccaggcactatcgcccgccagttcgtaaaccttgccttcgtgaccggcttcgctaatcacgcgtgccgcagctgccgcataatctgcccgcgttgcactggcgattttgccatcgcccgccgcaccgataaatacgccgtgttccagtgctgccggggcgctggcgaggtagttttcgctgtaccagccgttgcgcagcagggtgtaaacgatgccagaatcagccagcattttctccgtctcgatgtgctcatcggcgaggccgagcggggaggtatctgcatgtagcaggctggtataagcgataaatttcacgccagccgcctttgcggcattaataacattacgatgctgcggggcacgttgacccacttcgctggaagagatcagcagtagtttttccactccctgaagtgcagatgtcagtgcggcttcatcgccgtagtcagcctgacgcacggtaatgccttgtgctgccagggcttgggcttttgccggattacgaacgatagccactatttggctggcaggaaccgttttcatcaaggattcaataacatagtgaccaagttggccagtggcaccagtaatagcgatcatgggaagtctccatcgttttgtcttgtgtttaaatacgctaacacctaaacttacttttagtaagtacgtacaaaaaggtaagtatgaaatgagtcaggttagcctgagccaacaactgaaagagggtaatctctttgcggaacagtgcccgagccgcgaggtgttgaaacacgtcaccagccgttggggggtgttgattctggtggcgctacgcgaaggtactcatcgctttagcgacctgcggcgcaaaatcggtggggtgagtgaaaagatgcttgcgcagagcttacaggcgttagaacaggatggttttcttaaccgtatcgcgtatccggtggtgccgccgcatgtggaatatagcctcacgccgctgggcgagcaggtgagcgaaaaggttgctgcactggcggactggattgagttgaatttgcccgaggtgttggcggtgcgggatgaacgtgcggcataactgccggatgcgctgagcttatctggtctacggtgcatggcttgtagggcggataagatgcgccagcatcgcatccgccaataaatgccggatgcggttgatgatttataggccgaaaaagaagtgttttacttactcaaatccacctgataaatcgcaaacccgatatcatcggtcgcgactttattcatcggatactgccctttctctttaataaacgctgcggctttatcactcggagaggtttcgaaacggatatccagtttcttatcgccagctatcggtgctaaacgccagttgttatctgccgccgggtgaatttcccccgcacgtttgctctcatcagcaatccacgctgccagcacgctgcggttctcatccggactagcaaaagcgatatggctgtcgcccgtaccggcaaatttgccgccgtaagcgcgatagttattggtggcaaccaggaacatggcgttcggatcaatcggcttgccattaaaggtcaggttcttaatcctttccgcattggcattaatcatctggcactcgccgtcataacgggcgggctgggtaacatcaatctgataattcacaccatcaataacatcaaagttataagtgcggaaaccatcccagttgatgagactctgtggtttcgtgctgttgggatcaatctggttaaactgtcccgcggagcactccagccactctttcacctctttaccgctggctttcaccacaatcagcgtattgggatagagataaagatcggcggcattacggaaggtcaactggcctttttccacctccacatagcttgccgggtcatttttgcgaccaccgactttaaacggtgcggcagcactaagcaccggcagttttgccagatccggatcgccctgaatgtaatgctcgacatacgctttttgcgcgttgttcaccacctgcacggtcggatcgtcctgcaccagcgccagatagctatacatattgtcggcagatttaccgattggcttgctgacgaactggcgtgtggcatcgtgatcggctttgagtgtttctaccagcttgctgtcttccgccgcgagggattttttattagcgatgtcgtaaatcggtcgtgcttccgctttcgcctgcgtcacctgccatttaccgctgtcattactgagttgtaagtcgaccacaccaagatgatcgccccacatgcctggcattaccgccggaacaccattcagcgtgcctttggcgatatcagccccttcgatatcagcaaaatctttacctgggaaaacggcgtgagcatggccaaacataatggcgttaacgcccggaatttcactgaggtaataaacactgttttccgccatcactttatacggatcggcagatagcccggaatgtgccagaacgacaacaacatcggcacctttctcgcgcatttcaggcacgtatttgcgcacggtttcggtaatatcattcaccgtcactttcccggataaattagctttatcccagcccatgatttgtggtggcacgacgccaatatagccaatcttcagcgtctgtttttttccgtctttatcgaccacttcggtgtctttaattaaatacggtgtaaacattggctgtttggttctggcgtcaatgacgttggcatttacataagggaatttcgctcctgccagcgcatttttcaggtaatccagaccgtagttaaactcgtggttgccaagcgttccgacggtatagtccagcgtatttaatgccttatagaccgggtgaatatcacctgcttttaatcctttcgcgctcatgtaatcggccagcggactcccctgaatcaaatcgccgttatcaaccagtacgctgtttttcacttcattgcgggcatcgttaatcaggcttgccgtacgtaccagtccgaatttttccgtggcggtgtctttgtaataatcgaaatccatcatgttgctatgcagatcagtggtttccatgatacgcagatcgaccgtcgctgcattcacactggcggcaatcagcgtggccaggagcgttgcgctaaacttaatcatcagggacatccttttatcatcgggaatacgaaagaaaagggagaataaacgtcttacttatagaacagtgaagaatgccacaattttacgctttgaaaatgatgacactatcacagttggcgcattcattaacgatagggtataagtaaaacaataagttaacaccgctcacagagacgaggtggagaaatgttagatcaagtatgccagcttgcacggaatgcaggcgatgccattatgcaggtctacgacgggacgaaaccgatggacgtcgtcagcaaagcggacaattctccggtaacggcagcggatattgccgctcacaccgttatcatggacggtttacgtacgctgacaccggatgttccggtcctttctgaagaagatcctcccggttgggaagtccgtcagcactggcagcgttactggctggtagactcgctggatggtactaaagagtttattaaacgtaatggcgaattcaccgttaacattgcgctcattgaccatggcaaaccgattttaggcgtggtgtatgcgccggtaatgaacgtaatgtacagcgcggcagaaggcaaagcgtggaaagaagagtgcggtgtgcgcaagcagattcaggtccgcgatgcgcgcccgccgctggtggtgatcagccgttcccatgcggatgcggagctgaaagagtatctgcaacagcttggcgaacatcagaccacgtccatcggctctagcctgaaattctgcctggtggcggaaggacaggcgcagctgtacccgcgcttcggaccaacgaatatttgggacaccgccgctggacatgctgtagctgcagctgccggagcgcacgttcacgactggcagggtaaaccgctggattacactccgcgtgagagcttcctgaatccggggttcagagtgtctatttactaaattcagatggcagaaacagtgtatttcctgattctgccatcctgatttctcccaacctaaaaagttataaataaaaagagattgtatttaaagtgcaaaaattcaattgctaataagttacattttaataatgagcgttttttgatagtttacttctatagtgagatatttaatggcgacataaagtaaccaaataaaataaggttgtcatatgttacccaggatcagacacaataattttattggtgcggtggagttatttgtaaagtctagctatacaaaaacacatagtaacaatttttttaacaacatccatcatgcatttaagaaaaaagattggattagcaattatgatagcctgttaactttgagggagttctttcgttgcgcaactcagattgataaaagtggttatcaggtgcttagtagtaaaaatgaaactgttcacgccatggataagtttcttatcagtttcagccttaaagataacggtgccgaatatacaatgacattgcgaggtagtggatttgaatacgaagaaatacccataacaataaatgaatataacagtttcatggatttcaaaaaccgtgaatttccgttagaacaaaacagacgattgtatgcccgggatattctacagaaaaaacagtctgacataccgaaaaggattaaaggttatattcaccaggcgattggtgacgtgtctttaggttatgccttattggaggatatagtaagcaaattaaaacggggtaaatttgaactccaaataccaggaggtggaattaaagaatgcgatggatggtatatttacgaaaaaataattgatgataattttgccatagtcatagaatctttgggctttgcgcttaaaatctatggaggggatgaacgttttcgtaatggttcctctgttgttttggaggatgaagattactctcttatttataattttctggttaatgcaggttgccaacaagtcgaattagccgaacaagtggatgcgatagtaagtgcgaatctggccgcagatagcgatattaccaaagaaaagatttgcgagaaatataaaagcaccattgaggcgtttaaaaaagagcaactagcgttaccagtattagttcggcgtaagaacagtgagacttaattcccctatcccatagataacgataggggaaaattatttttgcagaatttatgttattgccattatttgagcaacttttgcagcaggtccatcacttgctgcacctcttccggtgtgagcgccccgtctttggcccattgcacgcgaccatccttatccagcaccactacagcggaactttcttcatccagctgccaggcaccgagcgcgacgccattgctatcgacaataaactggctccagggataaagctttttattactctccagactgctgcgcacaaacatcccactacccggaatcgcgtcgtcggtgttaacaatggtggtggtctggtaacgatcgtgcggtaacttcgcacttttaatcgcttcaatcagcgtcgcgtttttctcttttgcagaggtgcgaccagcaatatgttgcagtactcgcacttttcccactaactgcgcgctgttccaggttttgtagctaaactgatctttatcaagcaccaactcgccccgatcggtaatgccaatcggcggcactcgctgaccggtttcgaactgatgtgcggaagccatcatcggcaacagcaggcaggtgagtgccagaatcttgcgtagggtcatggtgtttccttcttatgatatgcaggtgatccgaccacttgggtctgagttttaatcatatgtgctatttatcgaatttcccgcaagtgtgatgccagtttgcggtcaagcgcacaaatcatatgaaaaatgaatgcttatactgaagaccgcgcttcggtaaaaagataattctgaataattgtaacctttaggtaaaaaaagttatacgcggtggaaacattgcccggatagtctatagtcactaagcattaaaatttgcgcctcataatagttgggccgattgtggcaccgcacaggcgtaatactcagcaggagataacaatgaaaattttccaacggtacaacccacttcaggtggcgaagtacgtaaagatcctgttccgtggacggttatacatcaaggacgttggcgcttttgaattcgataagggtaagattcttatcccaaaagtgaaggataagctgcatttgagtgtgatgtccgaagttaaccgtcaggttatgcgtctgcaaacagagatggcttaaccaaagtgctatgcagtaaaaagtgctatgcagtaataagacggctcctgattcaggagccgttgatgtttctgggggttacgcgacgctttcttctttatctttagcgtcaggcagttttgggctaagggcggtggccttgctgtcgatccgggtcaccagcagctggtcgatgcggtagttatcgatatccaccacttcaaatttgtagccggcgaatttcacgctatcggtgcgtttcgggatcttacgcagcataaacatcataaagccgccgatggtttcgtagttgccgctctgcgggaactcgtcaatatccagcacgcgcatgacgtcgtcaattggggtgccgccgtcaatcagccaactgttctcatcacgggcgacaatctgctcttccagcccctgaccgaccagatcgcccatcagcgtggtcatcacgtcattgagggtgatgatccccaccaccagcgcgtactcgttcatgatcaccgcgaagtcttcacctgcggttttaaaactttccaacgcctcactaagggttaacgtatccggcacaatcagcgtgttgcgaatttgtacgccgctgttcagtgccaggctttggttagccagcacgcggttcagcaggtctttagaatcgacataaccgatgatgtggtcaatatcttcattacagacgaggaacttagagtgcggatgttccgccaccttattcttcaggctttgctcatcttcgtggagatcaaaccaaatcacgttttcacgcggtgtcatactagacggaacggtacgggattccagctcaaagacgttttcaatcagctcgtgttcctgtttacgtaacacgcccgccagcgcaccggcttccactaccgcgtagatgtcatcagaagtgatgtcatctttacgtaccattggcagtttgaaaatacggaagattatgttcgccaggccgttgaagaaccacaccagcggggtgcaaacgtacaggcagaagcgcatcgggttgatgatacgcaaagccacagcttctggcgcaatcataccgatgcgtttcggggttaaatccgcaaacaggataaacatgccagtcactaagctgaaagagagaataaagctcagttgctcagagagctctgcgctcatatagcgggagaacaggctgtgaaaagctggagaaaatgccgcatcaccgacgataccgccgagaatcgccactgcgttcagaccgatttggaccacggtaaagaacatgccgggattttcctgcatattcagaacgcgttgggcatttatattgccttcatcagccagcagtttaagtttgattttgcgactggcggcaaggctgatctcggacatgctgaagaacgcacttacagcgatcaagcagagtatgactaaaatactgtttaacatatcttatccgacctttcaggccagatcctcggaaggggaagttgattaatttgtgtgaaatacacattgaaagccgattcgaagaaagtgaaccggcattttcagtggctagtatagcgtaaggtactgtaaagccgccagagggttaaaattcagacagctgaaaaatgcaaaactgcctgatacgctatgccgatcaggcctacgcagtccttgcaatatattgaatttggacgattttgtaggcctggtaagtcgtttacgccgcatcaggcatagacaaagagcactttatcaacaaactacatttgtacccgtaacgttatgcttccggcggcagacagacgccaattccgccaattccacagtaaccatacgggtttttatgcagatattgctggtggtcatcttcggcataataaaacggtgtggcgttagcgatttccgtggtgatgtgacgatcgtcatcggcggcaagcatcgccgcctgaaaacgttccagactggcgcgagctgcggcatcctgttctggggtcagcggataaatcgcactacgatactgcgtgccgtggtcattgccctgacgcattccctgggcgggatcgtgattctcccaaaatacctgtagcaactgctcatagctgatgacggaaggatcgtaaacaatgcgtaccgcttcggcatgacccgtatcaccggagcacacttcccgataagtcggatttggcgtatagccgccggtatagcctgcggcggtgctgtaaacgccgggtaactgccagaacagacgctccacaccccagaaacaacccatcgcaaaaatggcaatctccattccgtcaggtacattggtcatactgtgaccgttgaccgcatgcagcgtggctacgggcatcggggtgttacgtccaggcagggcatcggcgggggaaaccagatgctttttatcaaataaactcatggtgtcgctctcccgaaaatcggtcattggggttaaggttgtaacaagaggcgtatttgcacacaataaccaccgtgaataggtctaaagtaaaacataagaaatatttggggtttagtctgctttttaatccatattactggatttttgttaagccgtttaacggcgttccaggggcaggaaaaaaggatattcaggagaaaatgtgcgctatatccgacagttatgctgtgtaagcttactctgcttaagcggatctgccgtcgccgcgaacgtccgtctacaggtcgaggggttaagcggacagctggaaaagaacgttcgtgcgcagctttctacgattgaaagtgatgaagtgacgccagaccgtcgctttcgcgcacgcgtcgatgatgccatccgcgaaggtctgaaagcgctgggttattaccagccgaccattgaatttgatctccgtccaccgccaaagaaagggcggcaggtattgatcgccaaagtcacgccaggcgtgccggtgttaattggcggcaccgatgtggtattgcgcggcggcgcgcggaccgataaagactatttgaaattgctcgatactcgcccggctattggcacggtactgaaccagggcgattatgaaaatttcaaaaagtccttaaccagcattgcgttgcgtaaaggttatttcgatagcgaatttaccaaagcgcagctgggcattgcgctcggcctgcataaagccttctgggatattgattataacagtggcgaacgttaccgctttgggcatgtgacctttgaaggaagtcaaatccgcgatgaatacctgcaaaatctggtgccgtttaaagagggcgatgagtacgaaagcaaagatctggcagaactgaaccgccgactttctgctaccggctggtttaacagcgtggtggtggctccacaatttgataaagcgcgcgaaacgaaagtattaccattgacgggcgtggttagcccgcgaacagaaaacaccatcgaaaccggggtcggttactctacggacgtgggaccgcgcgtgaaagcgacgtggaaaaagccgtggatgaactcttatggtcacagtctgaccaccagtactagtatttccgcgccggaacagaccctcgacttcagctataaaatgccgctgctgaagaatccactggaacaatattatttggtgcagggcggttttaagcgcactgacctgaacgataccgaatctgactccactacgctggtggcttctcgctactgggatctctccagcggctggcagcgtgccattaacctgcgctggagtctcgaccactttactcagggtgaaattaccaataccacgatgctgttttatcctggggtgatgattagccgcacgcgttctcgtggtggcctgatgccaacctggggcgacagccaacgctactctatcgactactccaacacggcctggggtagtgatgtcgatttctccgttttccaggcgcagaacgtctggatccgcacactgtacgatcgccatcgttttgttacacgcggcacgctgggctggattgaaaccggtgatttcgacaaagtaccgccggatctgcgtttcttcgccgggggcgaccgcagtattcgtggctacaaatacaaatctatcgctccgaaatacgccaacggtgacctgaaaggggccagcaagttgataaccggaagcctggaataccagtacaacgtgaccggaaaatggtggggcgcggtgtttgtcgatagtggcgaagcggtaagcgatattcgccgcagcgactttaaaaccggtaccggggtcggcgtgcgctgggaaagcccggtcgggccaatcaaactcgattttgccgtaccggtcgcggataaagacgaacacgggttacagttttacatcggtctggggccagaattatgagtttatggaaaaaaatcagcctcggcgtggttatcgttatcttactgttgctgggaagcgtggcgtttctggtgggcaccaccagcggcctgcatctggtatttaaagcggcggatcgctgggtgccaggactggatattggcaaggtcaccggcggctggcgcgatctcaccttgtctgacgttcgttatgagcagccaggcgtggcggtaaaagcgggcaatctgcatctggctgtcgggcttgagtgcctgtggaacagcagtgtttgtattaatgatctggcgctgaaagacattcaggtcaacatcgacagtaaaaaaatgcctccttctgaacaggttgaagaagaggaagatagcggtccgctggatctctccacgccgtatcccatcaccctgacacgggtggcactggacaacgtcaacattaagattgatgacaccacggtaagcgtgatggacttcacctccggcctgaactggcaggagaaaaccctgaccctgaaaccgacgagcctgaaaggcctgctgattgctctgccgaaagtggcggaagtggcgcaggaagaagtggtcgaaccgaaaattgaaaatccgcagccggatgaaaagccgctcggcgaaacgctgaaagatctcttttctcgcccggtattgccggaaatgaccgacgtgcatttgccgcttaacctgaacattgaagagtttaagggcgagcagctgcgcgtgacgggcgacacggacatcaccgtgagcaccatgctgctgaaagtgagcagcattgacggcaatactaaactggacgccctggatatcgattccagtcaagggatcgtcaacgccagcggcacggcgcagctgagtgacaactggccggtggacatcactctcaacagtacactgaacgtggagccgttgaaaggtgaaaaagtgaagctgaaaatgggcggcgcgctgcgcgaacagctggagattggcgttaatctttccggtccggtggatatggatttacgcgcccagacgcgactggcggaagccggattgccgctcaacgtggaagtgaacagcaaacagctttactggccgttcactggtgagaagcagtatcaggcggatgatctgaaactgaaacttaccggcaaaatgaccgattacacgctctctatgcgtacggcagtgaagggacaggagatcccgcccgcgactattaccctcgacgccaaaggtaatgaacagcaggtcaatctcgacaaactcaccgtcgcggcgctggaagggaaaactgaactcaaggcgttgctcgactggcaacaggccattagttggcgcggtgagctaacgcttaacggcattaacaccgccaaagagttcccggactggccgagcaaactcaatggcttgattaaaacccgcggtagcctgtacggcggcacctggcagatggacgtgccggagttgaagctgaccggtaacgttaaacagaacaaagtgaacgttgacggcacgctgaaaggcaacagttatatgcagtggatgatcccagggcttcatctggaactcgggccaaacagtgccgaagtgaaaggcgagctgggggtaaaagatctcaatcttgatgccaccatcaacgcgccggggctggataacgcgctgccggggcttggcggtacagcgaaagggctggtgaaagtacgcggcacggtggaagcgccacaactactggcagatatcaccgcgcgcggcctgcgctggcaggaactttccgtggcgcaggttcgcgtggaaggcgatatcaaatccaccgatcagatcgccgggaaactcgacgtacgcgttgagcaaattagccagccggatgtaaatatcaacctcgtcaccctgaatgccaaaggcagcgaaaagcagcacgagctacagttgcggattcagggggagcctgtctccgggcagcttaatctggcaggaagttttgatcgcaaagaagaacgctggaagggaactcttagcaatacccgcttccagacgccggttggcccgtggagcctgacccgcgatattgcgctggattaccgcaataaggagcaaaaaatcagcatcgggccacactgctggcttaacccgaatgcggaactgtgcgtgccgcaaactatcgatgcgggggccgaagggcgtgcggtggtgaatctcaaccgcttcgacctcgccatgctgaaaccgtttatgccagaaaccactcaggccagcggtatcttcacgggtaaagcggacgttgcctgggacaccacgaaagaggggctgccgcagggcagtatcacccttagcgggcgtaacgtgcaggtaacgcaaaccgtcaacgatgcggcgctgcccgtggcgtttcagacactgaatctgacggcggaattgcgtaacaaccgtgccgaattgggctggaccatccgcctgaccaataacggccagtttgatggacaggtgcaggtgaccgatccgcaaggccgccgtaatcttggtggcaacgtcaatatccgtaacttcaaccttgcgatgataaaccccatctttacccgtggggaaaaagcagcggggatggtgggtgccaacttgcgtctgggtggtgatgtgcaaagcccgcagttgtttggtcagcttcaggttacgggtgtggatatcgatggcaactttatgccgtttgatatgcaaccgagccagcttgcggtcaactttaacggtatgcgcagcacgcttgccggtacagtacggacccagcagggtgaaatctacctgaacggtgatgccgactggagccaaattgaaaactggcgggcgcgggtaacggcgaaaggcagtaaagtgcggatcaccgtgccgccgatggtacgaatggatgtaagcccagatgttgtattcgaggctacaccaaacctgtttaccctcgatggtcgcgtggatgtcccttgggcgcgcatcgtggtgcacgatctgccggaaagcgcagtaggcgtctccagcgatgtggtgatgcttaacgataacctgcaaccggaagagccgaaaacggcgagcattccgattaacagtaacctgattgtccacgttggcaacaatgtgcgcattgacgcctttggcctgaaagcgcggctgacgggcgatctcaatgtcgttcaggacaaacaagggctgggtctgaacgggcagatcaacatccctgaagggcgcttccatgcctatggtcaggatctgattgtgcgtaaaggtgagttactgttctctggtccgccagatcaaccgtatcttaatattgaagctattcgtaacccggatgctacagaagacgacgtaatcgccggagttcgcgtcactggtctggcggacgaaccgaaagcggagatcttctctgacccggcgatgagccaacaagctgccttgtcttatttgctacgtggacaagggctggagagcgatcagagcgacagtgcggcaatgaccagcatgctgattggtttgggggttgcgcaaagtggccagattgtgggtaaaatcggcgagacgtttggcgtaagcaatttagcgctcgacacccagggagtaggcgactcctcccaggtagtggtcagcggctatgtattgccaggtctgcaagtgaaatacggcgtgggtatatttgactctatagcaacactcacgttacgttatcgcctgatgcctaagctatatctggaagccgtgtctggtgtagaccaggcactggatttgctctatcagttcgagttttaacaatgcgaatatttgtctacggcagtttacgccacaaacaaggcaacagtcactggatgaccaatgcccagttactgggcgatttcagtatcgataactaccagttgtatagcctgggccactatccaggcgcagttccggggaacggaacggtacacggtgaagtttatcgtattgacaacgccacgctggccgaacttgatgccttgcgcaccaggggcggtgaatacgcgcgccagttgattcagacgccgtacgggagtgcatggatgtacgtttatcaacgacccgtcgatggattaaagctaattgaaagcggcgactggttagacagggataagtaaccatatgcatacgccaccttcgggtggcgttgttttttgcgagacgactcgcattctgttttgtaattccctcaccttttgcttttctctccgagccgctttccatatctattaacgcataaaaaactctgctggcattcacaaatgcgcaggggtaaaacgtttcctgtagcaccgtgagttatactttgtataacttaaggaggtgcagatgcgtattaccataaaaagatgggggaacagtgcaggtatggtcattcccaatatcgtaatgaaagaacttaacttacagccggggcagagcgtggaggcgcaagtgagcaacaatcaactgattctgacacccatctccaggcgctacagccttgatgaactgctggcacagtgtgacatgaacgccgcggaacttagcgagcaggatgtctggggtaaatccacccctgcgggtgacgaaatatggtaaagaaaagtgaatttgaacggggagacattgtgctggttggctttgatccagcaagcggccatgaacagcaaggtgctggtcgacctgcgcttgtgctctccgttcaagcctttaatcaactgggaatgacgctggtggcccccattacgcagggcggaaattttgcccgttatgccggatttagcgttcctttacattgcgaagaaggcgatgtgcacggcgtggtgctggtgaatcaggtgcggatgatggatctacacgcccggctggcaaagcgtattggtctggctgcggatgaggtggtggaagaggcgttattacgcttgcaggcggtggtggaataaggtgtgtttatttatcgcgggcataaaaaaacccttactaaccgaagcccggcgttcagggttattacgccagaagaacttatttattctttgcgcgctcgaaggaggcaacgatttcagctttagcggcttctgcgttttcccaaccttcaactttcacccacttgcctttttcgaggtctttgtagtgctcgaagaagtgagcgatttgcgctttcagcagttcaggcagatcgttaacgtctttaatgtgatcgtattctttgctcagcttgctgtgcggaaccgcaaccagtttcgcatcttcaccggcttcgtcggtcattttcagaacgccaaccggacggcaacggatcacagaacccggctgcagcgggtacggagttgggaccagtacgtcaaccgggtcaccgtccagagacagggtgtggttgatgtaaccgtagttgcatggatagaacatcgcggtggacatgaagcggtcaacgaacagtgcgccgctctctttgtcgatttcgtatttgatcggatctgcgttagccgggatctcaataacaacgtagatgtcttccggcagatctttacccgcagggacgttgagtaagctcatgtctgtttcctttaaaaatatgtggcaaacaagtgccgagtattatagccaactcgcgccgaatgtcttcgcttgttttcgtcttcattttcctttttcaccagttttaagacggtatacagagcaggaaaatccataaccgtagccgcatttttcatagtgagatgaaagcgattacaaacttgtgattaacgttttatttacttttttgaagtgtgatgtaacgcaatctgttacataacgaattgtctatagttttttcgcgaacatcttttaaccaataataactaccccgacgaggacaaccctatgtggaaacgcttacttatagtctctgcagtcagcgcagccatgagctctatggcgttggccgctccattaaccgttggatttagccaggtcggaagcgaaagtggctggcgtgccgcagaaaccaatgtggcgaaaagtgaagccgaaaagcgcggaatcacgttgaaaattgccgatggtcagcaaaagcaggaaaaccagattaaagcggtacgttccttcgttgcacaaggggtggatgcgatctttatcgctccggtggtcgcgacaggttgggaaccggtattaaaagaggcgaaagatgccgaaatcccggtattcttgctcgatcgttccattgatgtgaaagacaaatctctctatatgaccaccgtcactgccgacaacatcctcgaaggcaagttgattggtgactggctggtaaaagaagtgaatggcaaaccatgcaacgtggtggagctgcagggcaccgttggggccagcgtcgccattgaccgtaagaaaggctttgccgaagccattaagaatgcgccaaatatcaaaatcatccgcagccagagtggtgacttcacccgcagtaaaggcaaagaagtcatggagagctttatcaaagcggaaaacaacggcaaaaacatctgcatggtttacgcccataacgacgacatggtgattggtgcaattcaggcaattaaagaagcgggcctgaaaccgggcaaagatatcctcacgggttccattgacggtgtaccggacatctacaaagcgatgatggatggcgaagcgaacgccagtgttgaactgacgccgaatatggcaggtcccgccttcgacgcgctggagaaatacaaaaaagacggcaccatgcctgaaaagctgacgttaaccaaatccaccctttacctgcctgataccgcaaaagaagaattagagaagaagaaaaatatggggtattgagggttgctatgcctgatgccgattcgtaggccggataaggcgctcgcgccgcatccggcgatggtgcactgaagcctgatgcgacgcttaccgcgtcttatcatgcctactgggagcacgctttacaccgggggaaaccatgacgaccgaccaacaccaggagatcctccgcaccgaaggattaagtaaatttttccccggcgtcaaagcgttagacaacgttgatttcagcctgcgccgtggcgaaatcatggcgctgctcggtgaaaacggggcgggaaaaagtacgctaatcaaagcattaactggtgtataccacgccgatcgcggcaccatctggctggaaggccaggctatcagtccgaaaaataccgcccacgcgcaacaactcggcattggcaccgtctatcaggaagtcaacctgctacccaatatgagcgtcgctgataatctatttataggccgcgaacccaaacgcttcggccttctacgccgcaaagagatggaaaagcgcgccaccgaactgatggcatcttacggtttctccctcgacgtgcgcgaaccgctcaaccgctttagtgtcgcgatgcagcaaatcgtcgctatttgtcgggctatcgatctctctgccaaagtgctgatcctcgatgaacccaccgccagtctcgacacccaggaagtggagttactgtttgacctgatgcgtcagttgcgcgatcgcggcgtcagcctgatttttgtcactcactttctcgatcaggtctatcaggtcagcgatcggatcaccgtcttacgcaacggcagtttcgtaggctgtcgggaaacgtgcgagctaccgcagatcgaactggtaaaaatgatgctggggcgcgagctggatacccacgcgctacagcgtgccgggcgaacattgttgagcgacaaacccgttgccgcgttcaaaaattacggcaaaaaaggaacgatcgcaccgtttgatctcgaagtacgccccggcgagatcgtcggtctggctggattgctgggaagtggacgtaccgaaaccgccgaagtgatcttcggtatcaaacctgctgacagcggcacggcgttgatcaaaggcaaaccgcaaaacctgcgaagcccacatcaggctagcgtactgggcattggcttctgcccggaagacaggaaaaccgatggcatcatcgctgccgccagcgtgcgggaaaatatcatcctcgctctccaggcccagcgcggctggctacgtcccatttcccgcaaagaacagcaagagattgccgaacgctttatccgccagcttggcattcgcacacctagtactgaacaaccgattgaatttctctccggcggcaatcagcaaaaagtgttgcttagtcgttggctactgacccgaccgcaatttctgatcctcgatgagccaacccgcggcattgatgttggtgcccacgccgagatcatccgcctgattgaaacgctatgcgccgatggtctggcgctgctggtgatctcctccgaactggaagagctggtgggctatgccgatcgggtgattatcatgcgcgatcgcaaacaggtggcggagatcccgctggcagagctttccgttccggcgatcatgaacgccattgcggcgtaaggagaacagtgtgatgcctcaatctcttccggacaccactacgccaaaaaggcgctttcgctggccgacggggatgccgcagctggtagcactgttgctggtgctgctggtcgatagcctggtagccccgcatttctggcaggtggtgcttcaggatgggcgtttgttcggtagccccatagacattcttaaccgtgcagctcccgttgcgttactggcgattggcatgacgctggtgatcgccaccggtgggattgatctctccgtaggggcggtgatggctatcgccggagccacaacggctgcgatgacggtcgcgggattcagcctgccgattgttttgttaagcgccctgggcaccggcatcctggcgggattgtggaacggcatactggtagcgatcctcaaaattcagccgtttgtcgccactctgatcctgatggtcgccgggcgcggcgtggcgcaactgatcaccgccgggcagatcgtcacgtttaacagcccggatctcagttggttcggcagtggaagcctgttgttcctgccaacgccggtcattatcgcggtgctgacgcttatcctgttctggctgttgacccgcaaaacggcgctggggatgtttatcgaagccgttggtatcaacattcgggcggcaaaaaatgccggggtaaacacgcgaatcatcgtcatgctcacttatgtgttgagcgggctgtgtgcggcgattgcgggcattatcgtggcggcggatattcgcggtgccgatgccaacaacgctgggttatggctggagctggacgccattctcgcggtggtgattggcggcggaagcctgatgggcgggcgctttaacctgctacttagcgtggtgggggcgctgattattcaggggatgaacaccggaattttgcttagcggctttccgccagagatgaaccaggtggtgaaagcggtggtggtgctttgcgtgctgattgttcagagccaacgctttatcagtctgattaaaggagtacgtagccgtgataaaacgtaatttgccactgatgatcaccatcggcgtctttgtgttgggttatctttactgcctgacccagtttcccggttttgcttccacaagagtgatctgcaatatcctgaccgataatgcctttcttgggatcattgccgttggcatgacctttgtgatcctcagtggtgggatcgatctctccgtcggtagcgtgatcgcctttactggcgtgtttctggcaaaagtgattggcgatttcggcctcagcccgctgctggcgtttccgctagtgctggtgatgggctgtgccttcggcgcatttatggggcttctgatcgacgccctgaagatcccggcatttatcattacgcttgcggggatgttctttttgcgcggcgtcagctatctcgttagcgaagagagcattccgataaaccatcccatttatgacacgctcagtagccttgcgtggaaaatccctggcggcggtcgcttaagtgcgatgggactgctgatgttggcggtggtggttatcggcatattcctcgcgcatcgtacccgttttggtaatcaggtatacgccattggcggcaacgcaacgagcgcgaatctgatggggatttccactcgcagcaccactattcgcatttatatgctctccaccggactggcaacgctggcggggattgtcttcagcatttatacccaggccggatatgcgctggcgggcgtaggtgtggaactggatgctatcgccagtgtggtaattggcggtacgcttttgagcggtggcgttggaacggtattagggacgctttttggcgtggcgattcagggactgattcagacttacataaactttgatggcacgctgagttcctggtggacgaaaatcgccatcggtattttgttgtttatttttatagcattacagcgtggattaacggtgctgtgggagaatcgtcagagtagcccagtgacaagagtcaacattgcgcagcaataaaaacgcctctccgtgtggagaggcgcaggagattacgcgtccgggaactcacggataaagcgttcgacatcttcaaccatatggtcgttgccgacaaagaaactacggcgctggtgcagggtttccgggatgatatccagaatacgctctttgccatcgctcgctttaccgcccgcttgttccgccaggaatgccatcgggttgcactcatacagcaaacgcagtttgccgtccgggtggctggcggtgcttgggtagagataaataccgcctttcagcaggttacggtggaaatccgcgaccagactaccgatataacgactggtataagggcggttggtggatttatcttcttcctggcagaatttaatgtacttcttcaccccgttcggaaacttaatgtagtttccttcgttgatggagtaggttttgcctttctccgggaagcgcatccgttcctggcacaggcagaaaacgccgaggctaggatcgtaagtaaaggcgtgaacaccgcatccggtggtgtaaaccagcatggtagaggagccgtataccacgtaacctgccgcaacctgtttgttaccaggctggaggaaatcttcttccgttaccggcgtgccaacaggcgtaacgcggcggtagatggagaaaatggtaccgacagagacgttaacatcgatgttggagctgccatccagggggtccatcagcaccacgtattttgcgtgttcacagccttcaaagacgacaatctcatcttcttcttcagaggcaatgcccgcaacgatatcgcgtgctttcagtgcggctttcagtttttcattagcgaacaagtcgagtttctgctgaacctcgccctgcacgttctcagcaccgctggcacccaggatatcaaccagtcctgctttgttgatatcgcgatggataatcttggcgcccagttttattgcgctcagcaaagcagtgagctcaccggtagcatgagaaaactcgtgctgcttttcgacaataaattcacctaacgttttcataaaactttccctgcaatgtttatggagtaaagcgaccgcaacaatcttaacaaataatctcaatgttgcgctcaggtgaatcgcgccagcaaattacggattatcctgaaatgcgtttctcacttgcccgacatatgcgtaaaatgagcggcagattaaaaaaggatagtgacgtatgcgcattcatattttaggaatttgtggcacatttatgggcggtctggcgatgctggcgcgccagttaggccatgaagtaacgggtagcgacgccaatgtgtatccgccgatgagcaccttacttgagaagcaaggcattgagctgattcaggggtacgatgccagccagctcgagccgcagccggatctggtgattattggcaacgccatgacccgtggaaatccgtgtgtggaagcggtactggaaaaaaatatcccttatatgagtggtccacagtggctgcacgattttgtgctgcgcgaccgctgggtgctggccgttgccggtacacacggcaaaaccaccaccgcgggaatggcgacctggattctggaacagtgtggttacaaaccgggctttgtaatcggcggtgtgccggggaactttgaggttagcgctcatctgggcgaaagcgacttctttgttatcgaagcggatgagtatgactgcgccttcttcgacaaacgctctaaatttgttcattactgcccgcgtacgctgatcctcaacaaccttgagttcgatcacgccgatatctttgacgacctgaaagcgatccagaaacagttccaccatctggtgcgtatcgttccggggcagggccgtattatctggccggaaaatgacatcaacctgaaacagaccatggcgatgggctgctggagcgagcaggagctggtgggtgagcagggtcactggcaggcgaaaaagctgaccaccgatgcttccgaatgggaagttttgctggatggcgaaaaagtgggcgaagtgaaatggagcctggtaggcgaacataatatgcacaatggcctgatggcgattgcagcggctcgccatgttggtgtagcgccggcagatgccgctaacgcgctgggtagctttattaatgctcgtcgccgtctggagttgcgtggtgaagcgaatggcgtcacggtatatgacgattttgcccatcacccgacggcgattctggcaacgctggcggcgctgcgtggcaaagttggtggtacggcgcgcattattgctgtgctggagccgcgcagcaataccatgaaaatggggatctgcaaagacgatctggcacctagtttaggtcgtgccgatgaagtcttcctgctgcaaccggcgcatattccgtggcaggtggcagaagtggcagaagcctgcgttcagcctgcacactggagtggcgatgtggatacgctggcagatatggtggtgaaaaccgctcagcctggcgaccatattctggtgatgagcaacggcggttttggtgggatccatcagaaactgctggatgggctggcgaagaaggcggaagccgcgcagtaattcggccttagccagatatagtatgcgtaggccggataaggcgttcacgccgcatccggcatttgagcatagtgcctgatgcgacgcttgatgcgtcttatcaggcctacaggtgcaccgtatccggcaaaccatactcacatcaacaacgaaaattacccttcgttctccgctaactcgcgcagatactggaaaatctggcgtgcggatttcggcggcttattcccttctttctctttcttcgcgttgcggatcagagtacgcagttgctgacgatcggcatcgggccacagatttaatacctcagcgatggcgtcatcaccttgatcgatcagacgatcgcgcaggttttccagtttatggaacagcaccacctgctggttgtgacggtttttcagcttatccagcgcctgacgaataggctctacgtcgcgctggcgcagcatcttaccgatgagctgcaactggcggcggcgaccttccatcttaatacgctgggcgagctcaatagccgcgcgcagatccgcatctaacgggatcttatccagcgcgtttttccccagatcaacaatttccgcgccaaggcgttttagctcctcggcatcacgtttaatttcacttttactgacccagataatttcatcgtcttcgtcttcgatgtcatcaccgggaacgtcgtcgagccagtcttcgggctgcttagtcatctcaggctccttaaaaaaagaggctaatgttaccagttaagatgcgcactgaaaaacggttctctgttagacttcagagaaactctctacattatggcacttgcaatgaaagtaatctctcaagttgaagcgcagcgcaagattctggaagaagcagtttccactgcgctggagttggccagtggcaaaagcgacggtgcggaagttgccgtcagcaagaccaccggcattagcgtaagcacgcgttatggtgaagtggagaatgttgaattcaatagcgatggcgcgctggggatcactgtttatcaccagaaccgcaaaggtagcgcaagttccaccgatttaagcccgcaggccattgcccgtactgtacaggcggcgctggatattgcccgttataccagcccagatccctgtgccggcgtggcagacaaagagctgctggcctttgacgcaccagatctcgacttgttccaccctgcggaagtttccccggatgaagccattgaactggcggcccgcgcagaacaggcggcattgcaggcggacaaacgcatcaccaataccgaaggtggcagctttaacagccactacggtgtcaaagtttttggcaacagccacggcatgttgcagggttactgcagtacgcgtcatagcctctccagctgtgtaattgccgaagaaaatggcgatatggagcgtgattacgcctacaccattggtcgtgcgatgagcgatctgcaaacgccagagtgggttggggccgactgtgctcgccgtactttaagccgtctgagtccgcgtaaactctccaccatgaaagcgccagtcatttttgccaatgaagtggcaaccgggctttttgggcatctggtgggggcgatagcgggtggaagcgtttatcgtaaatctaccttcctgctggatagcctgggtaaacaaattctgccggactggctgaccattgaagagcatccgcatctgctgaaagggctggcgagcacgccattcgacagcgaaggtgtgcgcaccgagcgtcgcgatattattaaagatggcatcctgactcagtggctgctgaccagctacagcgcgcggaaactggggctgaaaagcaccggacatgcgggcggtattcacaactggcggattgccggacaaggtctaagcttcgagcagatgctcaaagagatgggcaccgggctggtggtgacggaattgatgggccagggcgtgagtgccattaccggtgattattcccgtggtgcagcgggcttctgggtagagaatggcgaaattcagtatccggtgagcgaaatcaccatcgcaggtaatttaaaagatatgtggcgcaatattgtcaccgtcggtaacgatattgaaacacgcagtaatatacagtgtggttctgtgctgttgccggagatgaaaatcgccggacagtaaaaaaactggcgcgacctgccgcgctataaactaaaaaattacacaaaatcattcgcactgcatcgagacggaaagtgaatgagggccggggagcgtactcgcagtacgtgacccggtcgaatgagcgtagtcgtcgatgaggcagtgtgaaggatgaagtgtaaataaaaaaggaactattcttgcagtctcctcgttggtattcagttcggcgtcatttgctgctgatctcgaagacaatatggaaaccctcaacgacaatttaaaagtggtcgaaaaagccgataacgcggcgcaagtcaaagacgcgttaacgaagatgcgcgccgcagcgctggatgcgcaaaaagcaacgccgccgaagctcgaagataaaagtccggacagcccggaaatgaaagatttccgccacggtttcgacattctggtcggtcagattgacgacgcgctgaagctggcaaatgaaggtaaagtaaaagaagcgcaggctgctgcagagcaactgaaaacgacccgcaatagttatcacaagaagtatcgttaattcctcatttccctgttgcctgcactcaggtaacagggaacttatcatcgcaaatgatgcaccacctgattgctgctgccgcgccagatcagggaagggtcttttaaatcctgcacaaatttgccgtcgaccagcacgttaatcaaatcaacaacctgcatttgcgcagcgttgagttcgtcgagtttatagcctgtccacacccagatgtctttacccggacactcggcgcggatgcgttgtaccagtttcagaatatccggcacgttttgcggatgcagcggatcgccgccggagagggaaataccctggcgtttgatacgagtgtcattcagatcgttaatgatctggtcttccattgctttggtaaatggctgaccggaatttacccgccatgtgcttttgttatagcaaccggggcattcatgaacacacccggagacaaacagggtgcaacgagtgccggggccgttgacgatgtcgacaggatagtactgatgataattcattatttcgcctggcttatcagtccgcgtgtaggctgcatccggtaatcaatgcctgatgcgacgctgtcgcgtcttatcagacctggagcaattgccaaatgtaggccggataaggcgtttacgccgcatccggcatttgcttagctcagagtgaagattaacctatctgcccattccccaaatgtttaacgcggcgcttaacttcttcctgcttaccagcgttaaacggacgtgcatccgggctacctaaatatccgcacacgcggcgagttacgctcacacgggaggcgtcatggttaccacatttcgggcaagtgaagcctttgctggtgcactcgaactcaccggtaaagccacactcgtagcactcatcaatcggtgtattggtgccgtaatacggtacatgctgatagctgtaatcccagacatcttccagcgccttcaggttgtgctgaatgtttggatactcgccgtagcaaatgaaaccaccgttcgccagcggcgggtaaggcgcttcaaagtcgatcttgtcgtacgggttcaccttcttctccacatcgaggtggaaactgttggtgtagtaacctttatcggtcacgcccggcaccacgccaaactcagcagtatcgagacggcagaagcgatcgcacaggttttcactcggcgtgctgtagagactgaaaccataacccgtttcttctttccactgatccactgcctgacgcagacgttcaacaatggcgatacctttcgcgcgaagctgctcgttgtcgtaaacatgctcgccgccgaacagcgcgttaatggtttcgtggatgccgatgtaacccaggctaatagacgcacgaccgtttttgaagatttcagaaacatcatcgtcagcattgagacgcacgccacaagcaccttccatatagaggatcggggccacgcgcgctttcacgccttcgagacgagcgatacgggtcatcagcgccttacgtgccagcaccagacgttcatccagcagcttccagaaggtggcttcatcgccttttgcttccagagcaatacgcggcaggttcaggctgatcacgccgaggttgttacgaccatcgtggatctgctcgccgttttcattttcccacacgccgaggaagctgcggcagcccatcggagttttaaagctaccggtgactttcactacctgatcgtagttcaggatatccggatacatgcgcttgcttgcgcactccagcgccagctgtttgatgtcgtagttcggatcgccttttttatggttcaggccatcgcgaatcgcaaacaccagtttcgggaacaccgcagttttacggtttttaccgaggcctgcgatacggttacgcaggatgctttcctgaatcaggcggctttcccagctggtgcccaggccaaaaccaaaggttacaaacggcgtctgaccgttggcggtgtgcagggtgtttacttcgtactccagactctggaaggcatcgtagcactctttgatggttcgagagttagcgtagccttcggcgtccgggatgttccactcttctgcggtcttgcgatgtttgttgtagctggcagtgacaaacggtgccagcacttcatcgatacggttaatggtggtgccgccataaatatggctggcaacctgagcaataatctgcgcagttaccgcggttgccgtagagatgctcttcggcggttcaatctcggcgttccccattttaaagccctgggtcagcatgcctttcaggtcgatcaacatgcagttgaacatcgggaagaacggactgtaatcgagatcgtgatagtgaatatcgccacgctcatgtgcctgcaccacgtcacgcggcagcaggtgctgacgtgcatagtgtttagccacgatcccggccagcaggtcgcgctgggttggaatcaccttgctgtctttgttggcgttttcgttgagtaagctggcgttggtctgctcgaccagaccacggatctcctggttcaggcgaccgcgtttttcacgttcaatgtcgcgatcgtgacggtactcgatgtaagcacgagccagttgtttgtatggaccactcatcagctgattttcaactgcggtctggatctcattgatatccacctggttgcggccctgcatctgctcgctgacaaccgcggcaacagtggcgcaataatcggcatcatcgacttccgctgctttagctgcacgcagaatcgcttctttgatgcgctcacttttaaacggcactttgcagccgtctcgtttcatcacatgcggtgtcatgatcgctccatatttttaagaacaggttatccacagaaattgggaaaggcgttttccggttttttcgtttcgttttccggtgctttccgcaatcgccatccgcttatccacaacgccgcacctttttcgtggggagctgtagtagcaattatagtcgattaatacaacatattgggttgggacgcattttaaagtctatatatagtgctttgcatcaaggatgtttgagctttttttgatgtagctcaaagtaaaaagcagagcgtacggatgacgggcgctacagcgatatgtaaattttttaatgaatttgctggttgaaaaatcaacaaaaacaacatactgacagacaaaaccccggaatgaccggcattaccggggcttagggaagatttacttctgtaaccaccagacagcctcaaaaggccgtaaattcatggcacagggttgtggactggcttcttcgtagttatgcatcacaagctgccagttgccgcgcatttgccctgcctgccagggttggatctcacggctaaggttggcaatgaccagcaaggtttgccccttccattcacggcgatagcaccacaatacagggctgtttggcagcagatcctggtaattgccccatgtcaggatggcttcctgcttacgcagtgcgattaacttttggtaggtgtaaaacacgctggaatcatcggccagcgcggcttctacgttgatttgttgatagttatcgcccaggccaatccacggttcgccagccgtaaacccggcattatcgccgttgctccattgcatgggcgtgcgactgttgtcacgggatttactggcgaggattgccaataactcgtcggcatcacgcccatcgttgcgcagctcggcaaacatattgaggctctctacgtcgcgatagtcagtaatgcgcgtgaaatgcgggttggtcatgccaatctcttcgccctggtagatatacggcgttccctgcatgccatgcagcaccatcgccagcatttttgccgcaggcacgcggtattcaccttcatcaccaaagcgagaaacaatgcgcggctgatcgtggttacaccagaacaaggcattccatgctacgttgtgcattccttgttgccagtggcggaacaatgttttcaacgccacaaagtcaggtttagccagcgtccatttttcaccaccgggataatcgaccttcaggtgatgaaaattaaaggtcatgctcaattcactgcctgtcagagccgcgtatcgctggcaatgctcaaggctggtggaggacatttcacctacggtcattaacccgcgtggcgtaaacacatcgcggttcatctcgtgcaaaaactcgtgtgctcgtggcccgtcggtgtagaagcgacgcccgtcgccgtccaggtcttcagggaaacgcgggtctttggagatcagattcaccacatccaggcgcaacccgtcgaccccacgatcggcccagaactcacagacttttttcagctctgcgcgtaccgctggattctcccagttgagatccgcctgttctggtgcaaagagatgcaaatagtactgttcgctttccgcatgccagcgccacgcactaccgccaaatttactacgccagttgttcggtggcgtttctggttctccatcgcgccagatataaaactggcggtaagggctttctttgttcagcgcctcgcgaaaccaggcatgttgggtagaggtatggttaaacaccatatcgagaatgatacgaatcccgcggctttttgcctgcgtcaccagttcgtcaaaatcgtccagcgtgccgtaggtgggatcaatcgccgtatagttcgctacgtcgtaaccgttatcgacctggggagagacataaaagggggttagccagatggcatcaacgcccagtttatgcagatagtccaggtgttggataacgccacgtaaatcgccggtaccgctacccgtggtgtcctgaaaactctttggataaatctggtagataacgccgttttgccaccagtggggaagatgagtcattacgttattcctgcgaatgcgagggggcgcaattgcgccccgaagaaaattaaacaatgtccagcgtgcccaggcggtatttccgctgatagataaagctggtgagtacaatcgggatgatgatggcgatagccattgccagcgcaaacacctgccagtagctcggttgaatgctgagaattcccggcaggccgcctacgccgatgccattcgccataacgccgttcaggccgcatagcaatcctgccagaccagaaccaatcatcgcgcacagcatcgggaagcgatatttcaggttgatgccgtacattgcaggctcagtgaccccaagccaggcggagatagcggcaggcacggagatctcgcgttcattgtgcttgcggctggaaatgataatgcctatcacggcggagccctgagcgatattgctcagcgcaatcagcggccacactggcgtaccacccatgctttgaatcatctgcaaatcaatagcaagcgtggtctggtgtacaccggtgatcaccagcggggcgtacaggaagccaaacaatgctgcgccaatcggagcaaagctgccggtcatcaggtgacgtaccgcaaaggcaacgccatcgccaatcatgcgaccaaacggaccaatcagcgcatgggcgaggaacaccgcgaggatcaggctacagacgggtaccaccaccagatagaggtaatccggcacgatgcgtttaaggcgagtttcaataacgcccagcgccagtccggctaacagtgccgggatcacctgcgcctgatagcctactttggcgatgctgaacatgccaaagtcccacacttccggcagctgctgcccgagcagataagcgttcatcagctgtggagaaaccagtgtcacgccaagcacgataccaaggatcggcgtgccgcccatttttttcaccgcactccagcaaataccgaccggcaggtagaagaagatcgcttcaccgatcaaccacagaaaatcgtagatcgtttgcagggaagggtacatttgcgccagcgtctgaccgttgctcatgggcaaatcgccgatcacattgcgaaaaccgaggatcaaaccgccgctaatcaacgcgggcagcaacgggaagaagatcaccgcgaaatgagagatcaactgctcatgccatttcatattatgccgggcggctttttttacctgctctttatcaacctgcgcctgtccggtactcgcaatcagtgcttgatagtaatcacccacgttggtgccaatcaccacctgaaattgcccggcattggtgaaacagcctttcaccatagggagttgctcaatttctttcggtctggcattggccggttggttgaggacaaagcgtaggcgagtaatacagtggctcaccgtcgcaatattgccgcgcccgccgaccagttcaatcaaccgatcgatatccgtttggtttattttgctcatcataaagccccatggcagatgacatttttggttggctgcagaatatattgcgcggaaaaatttaaaaacgggaacgttcccgaaacgcagcgaagatcacaatttatcgttcaggaaacgatcaggacagggtggcggggatgatgatttgttgcggttcgctgcgcccggttacctgcgcgatcaactggcaagccgcctggcgtccagcttcggcgtaaccgggatctacggttacgatctccggatggaggaatttcattaacggcgtattaccgacgctcgccagttgcaaggtgtcgatgcgttgctcttgcaggtatttacttgcgccaagtgccagcgtgtcggttgcgcacagtaaggcggtagtttcaggcgtaatcacttttgcaacgttctcatagccttgcttcatagcaagccctagcagggcggcaacgggatgcagtttatgcgctttgcagaacgccaggtaggcttcgtgacgtcgcttaccggttgtcacgtcactgtgcggcacgccgagataactgatattacgatgcccctggtcatacagccgttgcatcaggattttgattgccccttcgtcgtcataacagacgctagcaaagccttttgcgtcacgcgccagcagaaccaggctactctgccagtgggctaacatttcttctgttatgccagtaaaaccgaacagcactacgccgtcgatattacgccgtttcagcactcccaaatgttcggcaactaattgcggggaaaactgactttccatcatgattgggtcgtaaccttgttcatagaacgctggcagcatggtttgaacggcgagattttcactcaagctatccagacgggtaacaatgatggcgaccactttatcgctttgcccacgcatagcgcgcgcagagcgggaaggggaaaatccatgctgattcatcactgcttcaacacgctcgcgggtgagctggctcacgccgctttcgttattcagcacccgggaaactgtagatttccccacgccgcttaagcgcgcgatatctttgatggtcagccgattttgcatcctgttgtcctgtaacgtgttgtttaattatttgagcctaacgttacccgtgcattcagcaatgggtaaagtctggtttatcgttggtttagttgtcagcaggtattatatcgccatagatgctacgaatattattggattctccttattatttgcggcgcttttttcacttaccggaggttatatggaacctgatcccacgcctctccctcgacggagattaaaacttttccggtaagcccgtcttttcacggcgttaccggatgcgtaaggccgtgacgttttaacgtccctgctcagctttattaccttcaggtaaggcttcgccacgcctgaagacatttctgtactgtttcagacagtgcggagggactccttatgtttaaagaaatttttacccggctcattcgccatttaccttcccgtctggttcatcgtgatccattgcctggcgcgcagcagacagtgaatacggtggtcccgccgtccttaagtgcgcattgcctgaaaatggcggtgatgcccgaagaagaattgtggaaaacgttcgacacccatccggaagggttaaatcaggcggaagtggaatctgcccgcgaacaacatggtgaaaataaattacccgcacaacaaccgagcccgtggtgggtacatttatgggtctgctatcgcaacccctttaatattttactcaccattctcggcgctatttcttacgccacggaagatttatttgctgcgggcgttatcgcgctaatggtcgctatttctacgttgctgaactttattcaggaagcacgttccactaaagcggcagatgccctgaaagcgatggtcagcaatactgcgacggtgctgcgcgtaattaacgacaaaggcgaaaatggctggctggagatcccgatcgaccagctggtgcccggcgatattataaaactggcggcgggagatatgatcccggcagatttacgtatcttgcaggcgcgggatctgttcgtcgctcaggcgagcttaaccggtgagtctctgcccgtagaaaaagccgctaccactcgccagccggagcacagcaatccgctggagtgcgacacgctgtgttttatgggcaccaccgtggtgagcggcacggcacaagcaatggtgattgctacaggtgccaatacctggtttggtcaactggcggggcgtgttagtgagcaggaaagcgagccgaatgcctttcagcaagggatcagccgcgtcagtatgctgctgattcgctttatgctggtgatggcaccggtggtgctgttaatcaatggttacaccaaaggcgactggtgggaagcggcgctgtttgcgcttagcgtcgcggtaggcctaacgccggaaatgttgccgatgattgttaccagcacgctggcgcgcggcgcagtaaagctgagcaaacagaaagtgatcgtcaaacatctggatgctattcagaactttggcgcaatggatattctgtgcactgataaaaccggcaccctgacgcaggataaaattgtgctggagaatcataccgatatctccggtaaaaccagcgaacgcgtgctgcatagcgcgtggttgaacagtcattatcagaccggacttaaaaacctgctcgatacagcggtgctcgaaggtacggatgaagagagtgcgcgcagcctggccagtcgttggcaaaaaattgatgagattccgtttgatttcgagcgtcgccggatgagcgtggtagtggcagaaaataccgagcaccatcagctggtttgcaaaggtgcattgcaggaaatcctcaatgtgtgtagccaggtgcgtcacaatggcgagattgtgccgctcgatgacatcatgctgcgtaagattaagcgggttactgatacgctgaatcgtcaggggctgcgcgtggttgcggtggcgacgaaatacctgccagcgcgtgaaggagattaccagcgggcggatgaatccgacctgatcctcgaaggatatattgcttttcttgatccgccaaaagagacaaccgctccggcactgaaggcattaaaagcgagtggaattaccgtaaaaatccttactggcgacagtgagttagttgcagcgaaagtgtgccatgaagtggggctggacgcgggagaggtggtcattggtagtgatattgaaacgctatctgacgacgaactggcaaatcttgcacagcgtaccacgctgtttgcccgcctgacgccgatgcataaagaacgcattgtgaccttactgaagcgcgaagggcatgtggttggctttatgggcgatggtattaatgatgcgcccgccttacgcgctgcggatatcggcatttctgtggacggcgcggtagatattgcccgtgaagcggctgatatcatcctgctggaaaaaagcctgatggtgctggaagagggggttattgagggacgtcgcactttcgccaacatgctgaaatacatcaaaatgacggcgagctctaacttcggtaatgtgttcagcgtgctggtagcgagtgctttcttgcccttcctgccgatgttgccgttacacttgcttattcagaacctgctgtacgatgtgagtcaggtggcgatcccgtttgataacgtcgacgacgagcaaattcaaaagccgcagcgttggaatccggcggatctggggcgctttatgatcttcttcggaccgatcagcagcatcttcgatattttgacgttttgcctgatgtggtgggtattccatgccaacacgccggaaacgcaaacgctgttccagagcggatggtttgtggtgggcttactgagccaaacgctgattgtgcatatgatccgcacccgccgtgtgccgtttattcagagctgtgcaagctggccgttaatgatcatgaccgtgatcgtgatgattgtcgggatcgcattgccgtttagtccgctggccagttatctgcaattacaggcgctgccgttaagctatttcccgtggctggttgcgattctggcagggtatatgacattaacccagttggtgaaagggttctatagccgtcgttacggctggcaataaagaataaactgggcacgatagccccgattcagattgtagacaaagtgagttttgttcatgccggatgcggcgtaaatgccttatccggccaacaaattcaataaattgcaggaatcacgtaggcctgataagcgtagcgcatcaggcgattttgcgtttgtcatcagacttaatccgggcatgatagcccggatttccatcaagattagcgacgaacagcgatcgcttcgatctcaatcttcacgtctttcggcagacgggcaacttcaacgcaagaacgtgccgggaaggtggcgttgtgttcggtgaagaaggcttcgtaagtggcgtttacggttgcgaagtcgttcagatcttttacaaacacggtagttttaacgatgtcgcccactttcaggccagcggcttcgacgatcgcttttacgttatccaggctctgacgtgcctgtgcagcgacgtctgccggtacttcgcccgttttcggatttaccgggatctgaccggaggtgatgatcatattgcccagatcaacgccctgtacgtaaggaccgatagctgccggtgcattttccgtcgcgatagttttgctcatgatttctcctttattacagcggtaaaaagtctggctcattatagggagccagacttttattaccaaccgcaattaattggccagcaccacattatgggaaaactctttttcacagtatttgcatttgagcgcgatatcattggcgcgttttcgcacggcaaagctggaactaaccggttcggcatggctgatacagttgctgttcgggcagaccagcacattgtcgatgcgctccggcagacttgggcggcttttacccaccacttcatagttgtcgatacggttaaccgtggcttgcggcgcatacaatgccagttgatctacttgatcttcactcaaaaaggtattttcgattttgatcagatctttgcggcccatctcgccagaaggcaggttcagaccaatggtgatgcgctgatccgtttcggtcagcttgaacagactcaacagcttaaaaccgatctgggcggggatatggtcaattaccgtgccgcgtttaatagcttcaacctgcaatttattatcgtgtgtcatctctatttccccttacagtaccagatcgcgattcagaaccagtgccagtaacgcctggcgagcgaaaatcccgttgcctgcctgctggaagtaccaggcgtgtggcgttttatcaacatccgtcgcaatctcatcaacacgcggcagcggatgcagcactttcatattggctttggcgttgtggagatcgctggcgcgaagaacaaactgcgctttcacgttggcgtactcggacgggtccagacgctctttttgcacgcgggtcatgtacaggatgtctacttccgccatcacttcttcaatagagctgtgcagactccatgcgatccctttttcatcgagcatatccagaatgtattgcggcattgccagcgcgtccggcgcgatgaagtaaaaacggttgccgtcgaacttcgctaacgcctgagtcagggagtgaacggtgcggccatatttcaggtcaccaaccattgcgacgtggagattgtccagacgcccctgggtttcctgaatagtgaataagtccagcaaggtttgcgtcggatgttggttggagccatcaccggcattcagtaccggtacattgccggaaaactcggtggccaggcgcgccgcaccttcctgcggatgacgcatcactatcgcatcgacgtaagtgctgataacgctaatggtatcggccagcgtttcgccctttttacccagacttgtattggcgctgtcggagaagcccaccacgctggcccccaggcggtgcatagatgtttcgaaagagaggcgggtacgggtagaggcttcgaagaaacagctggcaatgactttgtgcttcaacagctctggttgcgggtttgctttcagtttcgccgctgtcgccagcaccagattaaggtcatcgcgactaaggtcgtttatggaaatgatatgtttctgatatagcggattagccatcttttatctcctgacgcctgggcaaaaaaaagcccctcgattgaggggctgggaatgggtgatcaacgggaagaaaaacggcaggccagcgtcttttttcagacgcggtaagacaaaatgtcgaacacactgaaccatacatcctcccggcaaattgtccggcattatactcatcgtcagaagcggcgcaagcatttgatgcaatattttgtcagcgcaaacggtttatttgaattaaaagtcaaggtatatgcatttttatttgatgtgattctgcaggggaactgtccttcggtatcaataattgcagacattccctgctttttcctttttcactttcacgcaatcagatatgcattttattccattcatccgacttatagggcggagtgtgaaagcgaacggctaacactattgcttactgctcagggatgcgcgctatcactttaatttcaaaatcaaagcctgccagccatgtaacacccaccgccgtccagtttggataaggtggggcgctaaatatttcatttttcaccgtcatgatgtcttcaaattggttttctggatcggtatggaagctcgtaacatcaatgatatcgtcaaaagtgcatcccgcagctgccagggtcgcatgcaaattatcaaatgccagtctgacttgttgctgaaaatcgggttctggtgttccgtcctctcgacttcctacttgcccggaaacaaacagcaaatcgccggaacgaatagccgcagaataacgatgctcagcatatagactatgtcggccagcagggaaaacagcggttctttctaccatttggttatcctcaagatttacgacatgaacagaagatttctctttaccgggagccgcttttagcggacgacgtgagtaaacaaaacccagacatcatggataatggctgggcttaattgagcgtagtcggttatgcgccaaacgcgccatcaatggtatgcatcgcgccggtaacaaaactggcttctggccctgctaaccatgcgaccataccagcgacctcttccggttgcccatgtcttttgatagccatcaaactatgcaacatatcgcgcattggcccgttggcgggattagcgtcggtatcaattggccctggctggacgacgttaatggtgatcccacgcggtccaaaatcacgggccagcccgcgcgccatgccttgcagggcagatttgctggcggcataagcagccatgcctgcaacaggcatacgatcgccattcacggagccgatgattaagatgcgcccgccttcgggcatctgccgggcggcttcaacagaggcatgataaggagcatgaatattgattttgaaaaggcgatcaatatcgtcggcatttaattccagggcctcgccaaagacgccaatacctgcatttaccaccaggatatccaatgcgccgctcttacgaacgacatcaatgacagcgtctctgtcagcactatctgtgaatactgctgtcgctccagtctcttgtgccaggcgtttagcggcatctttgctccccgcataggtgaatcgtacattggccccatcggtgacgaaacgacgtacgatagcggcaccgataccacgactgccaccgaggatgagaactgtcttacctgtaaaagcgcccataaggactccttgatttattatgtaacatgcattacaaaactgttttaactttctgtcaacaggttttgtaatggtcactaaaaaacaatctcgcgttccaggtcgtcccagacgtttcgctcctgagcaggcaatctctgcggcaaaagtgctttttcaccaaaaaggtttcgatgctgtcagtgttgctgaagttactgattatcttggtattaaccccccgagcctctacgcggcttttggcagtaaagctgggttatttagccgtgtactcaatgaatacgtcggtacggaagctattccgcttgccgatattcttcgtgatgatcgtccggtaggcgagtgcctggttgaggtattaaaagaagcggcgcgcagatatagccaaaacggcggctgcgctggctgtatggttcttgaaggtattcatagtcatgatccacaagcgcgtgatattgccgttcaatattatcacgccgcagaaacgaccatttatgactacatcgccaggcggcatccacaacgcgcacaatgtgtgactgattttatgagtaccgtgatgtctgggctttctgcgaaggcacgagaggggcactctatagaacaactctgtgcaacagctgcaatggcgggggaagcgataaaaactattcttgaggagtgatgcgggccttgacccgaaaggcgggaaagcgcctgccgataagttgtgataagacaataattcacgcgttaaggctagcggaattgattatcttttcgtataacgatagaaatgaaacgttgttttaattaaggagtggaaaagatgatcatcggaaatattcataatcttcagccgtggctaccccaggagttacgccaggcgattgagcatatcaaagcacacgttacggcagaaacgccaaagggcaagcacgatatcgaaggcaatcgactgttttatcttatcagcgaagatatgaccgagccgtacgaagctcgccgtgcggagtaccatgcccgctatcttgacattcagattgtgttaaaaggtcaggaaggcatgaccttcagcacgcaacctgcaggcgcgccggataccgactggttagctgataaagacatcgcatttttgccggaaggcgttgatgagaaaacagttattctaaatgaaggtgattttgttgtgttttatccgggggaagtgcataaaccgctgtgcgcagtgggcgcgccagcccaggttcgcaaagcagtagtgaagatgctgatggcgtgatgacttttcgccgtaaataactcaaggtttacggcgagtttgtgaaaagagcgttttttgatatttttttgtgagtaaaatttgtaatgcttagacgttcttattcactcaaggagttcgtcatgagcaaaataagtgatttaaattattctcaacacattacattagccgacaattttaaacaaaaaagtgaagttttaaatacctggcgtgttggaatgaatgattttgcccgtattgccggggggcaggataacagaaggaatattctttctcctggagcatttttagagtttttggcaaagatatttaccctgggttatgtggattttagcaaacgctccaacgaagcgggtagaaatatgatggctcatattaagtccagttcttattctaaagatactaatggcaatgaaaaaatgaagttttacatgaataatcctgtaggggaacgagcggatagtcccaaggtgattatagaaattagtctttccactatcactactatggggactcgtcaaggacatacagccattatatttccacaacctgatggtagcactaaccgttatgaagggaagtcctttgaaagaaaagatgagagtagtttacacctgattactaacaaggttctggcgtgttaccaaagtgaagctaacaagaaaatagcgcgtctattaaataataatcaggagttaaataatctacagaaattaaataatctacagaagttaaataatctactgaagttaaataatatacaggggttaaataatcctcaggagttaaataatccgcagaatttaaatgattctcaggagttaaataacagccaggaattaaatagtccacaggagttaaatgatccgcaggagttaaataattctcaggacttaaataactctaaggtgagttgtacagttagtgttgattctacgattacgggtttattaaaagaaccattgaataatgcattattagcaataaggaacgaacatctgctattaatgcctcatgtatgtgatgaaagcattagttacttactgggcgaaaaaggtatacttgaagaaatagataagctctacgcattaaatgatcacggaattgataatgacaaagtaggtaacaatgaaattaatgacatcaaagttaacctgtctcatattcttattgattccttagatgatgcaaaggttaaccttacaccggtcatcgatagcattctggagacttttagtaaatccccatatattaatgatgtaagaatactggattggtgttttaataaaagcatgcaatattttgatgatactaaaaagataaagcatgcatgctccgtaataaatcatattaatcttcgcagcgatcagtctaaaatagctgagacattatttttcaatctcgataaagaaccctataaaaatagccctgaattacaggggttgatttggaataagttggttgtatatgtcaatgaatttaacttaagtaatcgagaaaaaacaaatttaatacaaaggctatttgataatgttgagtctatatttaatgaagtacctgtcagcattttagtgaatgatatttttatgaatgatttctttatgaaaaatcctgagatgattaattggtacttccctcagttacttaagagttatgagggtgaaaagatttattttgataatttaaaatatgatttaaatgataatgataaggaatctaataaagaaattttgaagaatcaaccagataatgttatcaaagaaaaactgaataatgaatacaaacttagatttagaatgatgcaaactatcttgcaaagcagagttaatgtattaccatatattaatgaacagcgtttaaataaactaaatccaccggaaaatttacgtatagcaatagaacactttgggtggaagaatagacctatcactgcataaaataatgtgatgccgggatggtttgtatttcccggcatctttatagcgatagcaattatttactgagcgtcgcgaccatcaccgctttgatagtatgcatacggttttccgcctgatcaaaaacaatgctggcggcagattcgaagacctcatcagtgacttccataccgccatgtaggccaaattcttccgccattttcttgccaagcgtcgtttggtcgtcatgaaacgcgggcaggcagtggaggaatttgacctccgggttaccggtcaactgcatcatcttgctgttcacctgatattcacgcagcaatgcaatccgttccgcccatttctcttttgcttcccccatgctcacccacacatcggtatagataaagtcagcaccttcaactcccttcgcgacatcttcagtcagcgtaatattcccaccattttgctgtgccagggcgcggcattccgtaaccagcgcagcttccggccagcacgcttgtggcgcgaccagacgcaaatccagaccggtaagcgccgcagcttcgagcatgctattgcccatgttgttacgcgcgtcacctgcatagaccagcgtcatttcgttgaacgctttgccgggcaaatgctcctgcatggtgagaagatccgccagcagctgcgtgggatggaactcattggtcaggccattccataccggcacgctagcgtattccgccagtgtttcgacaatctcctgaccatagccgcgatactgaataccgtcatacatgcgaccaagcacgcgggcagtgtctttaatgctctctttatgaccaatctggctgccgcttgggccgagataagtaacgcgagcaccctggtcatatgcggcaacttcgaaagagcatcgggtacgagtgctgtctttttcgaagatgagcgcgatgtttttaccagtgagtttggcttcttctttaccgcttttcttatcggctttcagcttcgcggctaactgcagcaggctgttgagttcagctggcgtgaaatcgagtaatttcaggaaatgcttatgataaaacccggacatagatccctcctgtggctaacgcctcaatgaattaaaattcaatttatatggatgattattcatttgcaagtctaaagcataaatctttgtcacaaaggtggaggcaatgtcagtggtgtgtgacaataagagtatcggcaggacattaagaggaatgagccatggcaaacccggaacaactggaagaacagcgtgaagaaacacgtttgattattgaagaattactggaagatggcagcgatccggacgcgctgtacaccatcgaacaccatctttccgcagacgatctggaaaccctggaaaaagcagcagttgaagcgtttaaactcggttacgaagtgaccgatccagaagagctggaagttgaagatggtgatatcgtgatttgctgcgacatcctcagcgagtgcgcgttgaatgccgatctgatcgatgcccaggttgaacaactgatgacgctggcagagaaatttgacgttgagtacgacggatggggcacttactttgaagatcctaacggcgaagatggcgacgatgaagattttgtcgatgaagacgatgacggagttcgccactaattaagcgtagcgcatcaggcccaggtagttcctgcaacctggtgaatttgtagcccggataaggcattcatgtcacatccggcataaacaaaacgtacgttgttaatgttcgaatgcccgcgagttgaacacgcgggcatttttttagagttcgcgcaacatccgcacttcacaatcgacatggcccgtgcagccaagcgcatagtcgatatgctcaaagcccaaatgctcataaagcgcaatggcttcctttaaaaaagcggtcgtttccagatagcagcgtttgaaacccatctctcgcgcctgctccatcgccattaaggccagtttttttgccagccctttgccgcggatagccggaagaaaatacatcttttgcagttcgcaaatatcgctctcactcccggttaatggcgctatcccaccgccgccgaccacttcaccctcgtactcaacgacccaatatgcatggccaggctgactatatacttgatacagctcgtcaagattcggatcggcgacggtgtagcctttatcagcggtaagaccgtattcggcggatacctgacgaatgacgcgggcgatagcaggattatcctgcagcgtcaggcgacgcattacaggactttgcggcgcaatgttattcatagtttaacccaataaaaataaagtaattatacatttgtttaataccactctcttcttacgtacgcaagcgacttataaagtaataaagtttttgccagcctattactgataagagtattgtaacgtggcagaacattttactgtctgtatatataagttatatcaatggattttttaattcagggaatttttatggctcaagttattaatgaaatggatgttccgtcccatagctttgtttttcatggtacaggtgagaggtattttcttatttgtgtggtgaatgtgttgttaacgattataacgctaggtatctatttaccatgggcattaatgaaatgtaagcgttatctttatgctaatatggaagttaacggacaacgattttcttatggaattaccggtgggaatgtttttgttagttgtcttttttttgtttttttctatttcgcaatcttaatgacagtgagtgcagatatgccgcttgttggttgtgttttgactttgttactgttggttttgcttatatttatggcagcaaaaggactgcgtcatcaggccttaatgaccagtctcaacggcgtaagatttagttttaattgctctatgaaagggttctggtgggtgacctttttcttgccgattttaatggccattgggatggggactgttttctttatcagcacaaagatgctacctgccaatagtagtagtagtgttattatatccatggttctgatggcaatagttggtattgtttccattggtatttttaatggtactttatatagtctggtaatgagttttctctggagtaataccagtttcggtatacatcgtttcaaggtgaaattagatactacgtattgtataaaatatgccattctcgcatttttagctttattgccttttctcgctgttgctggttatattatcttcgatcaaatattaaatgcgtatgatagttctgtatatgcaaatgatgacattgagaatttacagcaatttatggaaatgcaacgtaaaatgataatcgcgcagttaatctattattttgggattgctgttagcacaagttatttaacggtgtctttgcgaaaccattttatgagcaacctgagtctgaatgatgggcgtattcgttttcgcttaactttaacgtaccacggtatgctttatcgcatgtgtgcgttggtggtgatatccgggattacgggcggtctggcttatccactgctgaaaatatggatgattgactggcaggcaaaaaatacgtatttgctgggcgatttggatgaccttcctttaatcaataaagaagaacaaccagataaaggcttcttagccagtattagtcggggagttatgccttctttaccatttctgtaagagataaaaaaggccggagcatgctccggccttcgttttcatcactgtgttttgattacagcgcggcgataacagcctgctgttcaatcagtttcgctttcgcttccgcatagccttccagcttctcacgctctttcgcgatgaccgcttccggtgcgcgggcgacaaagccttcgttcgccagtttgttctcgatacggctgatttcaccttcaatcttcgccacttctttcgccagacgcgccagctcatcttctttgttgatgaggccagccatcgggatcagcagctctgcaccgtcgatgatcttcgtaacggaaaccggacctttgtcatcggcaggcagcacggtgatactttccagacgcgccagggtttgcaggaagccacggttttcatttacgcgacgttctgcatccgcgctgcaaccacgcagcagcagctccagcggtttgcccggcgcgatgttcatttctgcacggatgttacgtaccgcaacgatcgcctgtttcagccattcggtgtcggccagtgcggcttcatcaacctgagatgcatcgtactgcgggaacggctgcagcatgatggtgtcggcagtgataccgcaaagtactttcacacgctgccagatggtttcggtgatgaacggaatgatcggatgcgcgaggcgcagcagaccttccagtacagtcaccagcgtatggcgagtaccgcgcagttctgcttcggtgccaccgttcattaccggcttggtcagctcgagataccagtcacagaactggttccaggtgaactcatacagaatgcctgcggcgatatcgaagcggaagctgtccagcgcttcgcggtacgctttgatggtctggttgaactccgccagaatccagcggtccgccaggctcagcgtcatttcgccgccgttgaagccgcaatcctgaccttctgtgttcatcagcacaaagcggctggcgttccacagcttgttacagaagttacggtaaccttccagacgcttcatatcccagttgatgtcacgaccggtagacgccagcgccgccagggtgaagcgcagcgcgtcagtaccgtgcggctcaataccgttcgggaactgcttctcggtgcgcttacggattttgtccgccagctgcggctgcatcatattgccggtacgtttttccagcagttctggcaggctaataccgtcaaccatatccagtgggtcgataacgttacccttggatttggacatcttctggccttcgtcatcacgaatcaggccggtcatgtaaacggtgtggaacggcacctgcggtttgccattttcatctttgatgaagtgcatggtcatcatgatcatgcgggcaatccagaagaaaatgatgtcgaaaccagataccatcacgctggttgggtggaactgacgcagggcgtcggtattttccggccagccaagggtagagaaggtccacagcgcagaagagaaccaggtatcgagaacgtcttcgtcctgacgcaggacaacatcagcaccgaggttattttctttacgcacttcgtcttcgttgcggccaacataaacgttacccgcttcgtcataccatgccgggatacggtgaccccaccacaactgacgagagatacaccagtcctgaatatcgcgcatccaggagaagtacatgttttcgtactgcttcggtacgaactgaatgtcgccgttctcaaccgcttcaaccgccggtttcgccaggacatcggcacgcacgtaccactggtcggtcagcattggttcgataactacgccgccacggtcgccgtaaggaacggtcaggtcgtgcggtttaatttcttccagcaggccaagcgcgtcaactgcggcaacgactgctttacgtgcagcaaaacgctccagtttctggaactctgcagggatttcgctggaataaacgtcagattcgttacctttggtatcgaacacctgggcgctttcacggatatcgccgtcaaaggtcaggatgttgatcatcggcagggcgtgacgtttacccacttcatagtcgttaaagtcgtgcgccggagtgattttcacgcagccggtgcctttttccatgtcggcgtgttcgtcgccaacgatcggaatacgacggttaaccagcggcagaatgacatatttgccaatcagatctttgtaacgcggatcttccgggttaacggctacgccagtatcgcccagcagggtttctggacgggtagtcgcgaccaccagataatctttaccgtctgcggttttcgcaccgtcagccagcggatagcggatgtgccacatgctacctttgctttcgcggttttcgacttccaggtcagagatagcggtgcgcagtttcggatcccagtttaccaggcgtttgccacggtaaatcaggtcttctttatacagacgaacgaaaacttctttcaccgcattggacaggccttcgtccatggtgaagcgttcacgctcccagtcgacggagttgccgagacggcgcatctgacgggtaatggtgccgccagattccgctttccattcccagattttgtcgatgaaagcttcgcggccgtagtcgtgacgggttttaccttcttctgcggcaatcttgcgctcaacgaccatctgggtagcgatcccggcgtggtcagtaccgacctgccacagggtgtttttgccctgcatgcgctgatagcggatcatggtatccatgatggtttgctggaaggcgtgacccatatgcaaactgccggtgacgttcggcggcgggatcatgatgcagaaactttcctggctttcatcgccattaggcttaaagtagccctgcttttcccagtgctcgtaaagcggctgttcgatatcttgtgggttatatgtcttttccattatttccaggttgccgtattcaggttgaaaccagccacgcggtaggctttatagcgttcgcgcgccagttgtttcagagaatcttcataaggaacgaagtctaccacttctgtgaaagcggtggcaaaatctgcaaagcttgttcgcagactaatcaatatatcgcgccggctgctgctacgcttttgcggccaggcgatctccaccggtgcaccgccgcgcggtccttctcccgctaaattatgcggaacaaagctttctgccggacgcgcccacagggcttcatccagccggtaagcctgcttttcatcttcacaggcgatgagcacgcgcttaccgctgcgccaacgttctgcggcaatttcacacaccagttgctcaacggcgcttaagccatcgacggtggtgtcattgtccagaaggtagaacgtcgcgtttttcataaatggggcttcttgtggtggatttaaatacgcatcaggtatacaccgcagcgcctgatgcgacgctgttgtgtcttatcaggcctacgagttcagtgctgtgtaggtcggataaggcgttcacgccgcatccggcaataacagccttgcctgacgcaattactcttcgccgttaaacccagcgcggtttaacaggaactgtgccagcaacgctaccggacgaccggtggcgccttttgctttaccagaacgccaggcggtaccggcgatatccaggtgcgcccagttgtacttacgggtaaagcgactcaggaagcaacctgcggtaatcgccccaccaggacgaccgccaatgttcgccatatcggcaaaattggactccagttgttcctgatactcgtcacccagcggtaagcgccatgcgcggtcaccggattgttcagacgcggcaatcagttcatgggccagcggattatggttcgccatcagaccagtaatatgatgacccagcgcgatcacgcaggcaccggtcagcgtcgccacgtcaatcaccgcttccggctcaaaacgctcaacgtaagttaacacgtcgcacagtaccaggcggccttcagcgtcggtgttcagcacttcaacggtttgaccggacatggtggttaacacatcgcccggacgataggctcgtccgccaggcatgttttcgcagcctgccaacacgccgataacgttaatcggcagttgtagctccgcgaccatccgcatcacgccgtaaaccgctgccgcaccgcacatatcgtacttcatctcatccatgccttcactaggcttgatgctgataccgccggagtcgaaggttaaacctttacccaccagcacgattgggcgtgcatcttcgctcgcgttgcctttgtactcaatcacgctcatcaggctttcgttttggctaccctgaccgaccgccagataggaatgcatccccagctctttcatctgctgttcgccgataacgcgggtgatgacattcttgctgtagctgtcagccagctggcgcgcttgactagcgaggtaagcggcgttacagatattcggcggcatattgccgagatcttttgctgctttaatcccggcggcaatcgccagaccgtgctggatcgcgcgctcaccgctggtcagttcacggcgggtcggcacgttgaacaccatcttacgcagcggacgacgcggttcgctcttgttcgttttcagctgatcgaaactgtagagcgtctcttttgccgtctcgacagcctgacgcactttccagtagttgttacggcctttaacgtgcagctcagtcagaaagcagaccgcttccatactgccagtatcattcagcgtattaatggttttctgaataacctgcttgtactgacgctcatccagctcacgttctttgccgcaaccaataaggagaattcgctcggaaagtacattcggaacatggtgcagcaacaatgtctgccccggttttccttccagttcgccccgacgtagcagggcgctgatgtacccatcgctgattttatcgagctgttctgcaatcggagaaaggcgacgtggttcgaagacgcccacgacgatgcaggaactccgctgtttctccgggctaccgctttttacactaaactccatgcactacgctcctgaatcttaaagacaacggcggtggctacagatagaattgcaagctttcgtaactcatgtccgctgttgcgatgacttcgtgttaatcttaacgttattacggcattggcacgtcagaacaaaatctgagaggtgaatccgttgagtataattatcttagcgacgatttcgacgactcaagagaataaatgacgtttaagccatgaaacaagctaaaatcctgcaaaagacgagtttttacgggcgtatttaaagtgataatcataagatatctggtgcgggagacgctcaaaagccagctggcgatactcttcatcttgcttttgatcttcttctgtcaaaagttagtgaggatcctcggcgcagcggttgacggcgatattccggcgaatctggtgctctcccttctcgggttgggcgtgccggaaatggcgcagcttatcctgccattaagcctgttcctcgggctgctgatgacgctgggcaaactgtataccgaaagtgaaattacggtaatgcatgcctgcggcctgagcaaagcggttctggtgaaagcggcaatgatccttgcggtattcacggcaatcgtagcggcggttaacgtgatgtgggcgggaccgtggagtagccgtcatcaggatgaagtgttagcagaagcgaaagcgaaccctggcatggcggcgctggcgcaagggcaattccagcaagcgactaatggcagcagcgtgctgttcatcgaaagcgttgacggcagcgatttcaaagatgtgttcctcgcgcaaattcgaccaaaaggtaatgcacgtccttctgtggtggtggccgattccggacatttaacccagctgcgcgacggctcccaggtcgtcactctcaaccagggaacgcgcttcgaaggcactgcattgttacgtgatttccgcattacggacttccaggattatcaggcgatcattggtcaccaggcggtggcgctcgacccgaacgataccgaccagatggacatgcgcacattgtggaacactgacaccgatcgtgctcgcgcagaactgaactggcgtatcacgttggtattcaccgtgtttatgatggcacttatggtcgtaccgctgagcgtggttaacccacgtcagggacgcgtactgagcatgctgccagccatgctgctgtatctacttttcttcctgatccagacctccctgaaaagcaacggcggtaaaggtaagctggacccgacgctgtggatgtggaccgttaacctgatttatctggctttagcgattgttctcaacctttgggacaccgtgccggtccgccgcctgcgcgccagttttagccgtaaaggagcggtgtgatgcaaccttttggcgtacttgaccgctatatcggtaaaactattttcaccaccatcatgatgacactgttcatgctggtgagcctgagcggcattatcaagtttgtcgatcagctgaaaaaagccgggcaggggagttacgacgcgttaggcgcaggaatgtataccttgctgagcgtgccgaaagatgtgcagatcttcttcccgatggcggctctgcttggggcgttgcttggtcttgggatgctggcgcagcgcagcgaactggtggtgatgcaggcttctggttttacccgtatgcaggtggcgctgagcgtgatgaaaaccgccattccgctggtcttgctgacgatggcgattggcgaatgggtcgcgccgcagggcgagcagatggcgcgtaactaccgtgcgcaggcgatgtacggcggcagcttgctctctacccagcaaggcttatgggcgaaagatggcaacaacttcgtctacattgagcgggttaaaggtgacgaagagttaggtggcatcagcatttatgcctttaacgagaatcgtcgtctgcaatccgtacgctatgccgctactgcgaagtttgacccggaacataaagtctggcgtctgagccaggttgatgaatctgatctgaccaatccgaaacagattaccggtagccagacggtgagcggcacctggaaaaccaacctcacgccggacaaactgggcgtggtggcgctggacccggatgcactctctatcagcggtttgcacaactatgtgaagtatctgaagagcagcggtcaggatgccggacgttatcagctcaacatgtggagcaaaatcttccagccgctatctgtggcggtgatgatgctgatggcgctgagcttcatctttggcccactgcgtagcgtaccgatgggcgtgcgtgtggtcaccggtatcagtttcggttttgtcttctacgtactggaccagatcttcggcccgctgacgttggtttatggcatcccgccgatcatcggcgcactgttgccaagcgccagcttcttcttaatcagcctgtggctgttaatgagaaaaagctaaccgaatgaacgaataaagggagcgaaagctccctttattattgttagcaaagtgtgcttcgttcattcctgaaaaataattaaaattcaatatattgcagtggggtgggcatgataagacgcgccagcgtcgcatcaggcaaagacaaatctcgcctgacttaccttcttctcccccccagcaaactccccaacatcccgcgtacaatctgattcgtcacttggcgagcggcgcttttggccattgtttgcaccacaccatctttcttcccgccgcgtggtccggtagtgccgaacaaaatatccttcaatccaccaagaatgccgtcatccaccgctacctctttccctttcgcgggaggattattttgctgctcggtactggcctgaaagcctttttgcaacatctcataggcggattcccggtccacctcatcctcatatttgccatacaccggagagtgattaatcaagccattacgctcatcttccgtcaccggccccatccggctacaaggcgcgatcaccatcgcacgctccaccacagaagggcttcctttcgcatccagaaaagagatcaacgcctcgccggtgcccagttcctgaatcgccttttcggtatcaaacgccggattggcccgcatggtttgcgccgctgccttcactgctttctgatcttttggcgtaaaagcccgcaaagcatgttgaacgcgattaccgagctgcccgagcacattatccggaatatcagacgggttttggctaacgaaccagacgcccacgcctttactgcgaataagccttatcacctgctcaatcttatccagcagtacctgcggggcatcgttaaacagcagatgtgcctcgtcgaagaaaaacaccagttttggtttctccagatcgcccgcttccggcaattgttcatacaactcactaagcatccacagcaggctggcggcgtacagtttcggcatctgataaagtttctcggcgctgaggatattgataacgcctttaccgttggcatcggtgcgcatccagtctttgatatccagcatcggctcaccaaagaagtgtgctgcgccttgctgttccaggctcaacagcccgcgctggatggcaccaacgcttgcgctactgatattaccgtactgattctggaaggatttggcgttatcgccgatgtactgggtaattgcccgcagatctttaaagtcgagcagtaacagcccctgatcgtcagcaatgcggaagatgatattcagcacgccagattgcacatcgttgagattcaacagtcgtgccagcaacagcggccccagatcgctaaccgtcgcccgcaccggatggcctttctcgccaaagatatcccacaccaccaccggattggcatgcggttgccagtcattgacgccgatatttttaagccttgcgagcagtttttcgctcaccgttcctgcctgcgcgacgccggtcagatcgcctttcacatcagccataaacaccggcacgccgatttcgctcaaactctccgccagtttttgcagcgtaacggttttacccgtccccgttgcgccggtaatcagcccatgacggttagccattcccggcagtaaaaacagttctgtgtccggcgtgcgggcaattaacaggggttcactcatgagatatcctccagtttcctgcctggagtataggcaacgtccggcaaagagaatacgtgtaatgaagagaaaataacttaaagcgtgttgccgtgataaatctgatacccgaggtcaacagtgttgtggttgtgatcgttatttttaattttgctcagcaacatttgggcggccatccgaccaatatcaaaacggggagtaattacgctggcgaggcttgggatcatttgcctgccaatctccagcccatgaaaacccgcaatggaaatttgttctggcacggcgaggtttcgctcgcggcacagcagaagcgcacccatcgcaatatcgtcattggtgcaaaatacaccgtctaaatccgggtttgcgctaagggcatcacgcattaactgcattcctaaatgaatggaactgatggcgcgtggattcatgcgtaatggggaaagattatgcagcatcatcgcatcgcaatacccctgataacgctgttcatcgcgggtgtcatctttggaaccgagatacagaattttgtgcctgactcgcttctccagcatggtacacaccatgtcaaaagcggcctgccgattatcaaaaccgacctccatatccagccgttctccctgtacatccatcaattccacgaccggaatggtggcactacgcagaaatttcaccgtcctgatggtgtgatatttttcgctaagtataatcccgtcaatgttataagagagcaggttaatcacgctctcttcttcggaatcgcgatcgtaattgtaattagcaataagggtctgataattatgctcagaggtgacggattctattcccgcgagaatgtcagcgaagagttgattttgaaaactcggaatcaagataccgagggtataactttgtgcattcaacaacatgccgggagcgcgattagggatataattgatctcttccataattttggcgatgcgctcgcctgtttcctttgccacctttttcgggctgcggatataacgactcacggtcatttttgttacgccagccagcgtagcgatatcctgtaaagaaattctgtgattgcgcataacttctcccaacgtcgggggaatcttcaatcttcccccgaaactacatcacaatattttattctttcagtgcaatacggcgttaatggctaacacgcccagcaaacccataacagaaataagggtttccatcaccgtccaggtacgcaacgtttcaccaaccgtcagattaaaataccctttaaatagccagaagccagggtcgtttacgtgactcgcgatcacgctgcccgcaccggttgccagtaccattaaagcgggatcggcatgggtaacgttgataatcggcaacaccacacccgcggtggtaatggccgcgacggtggcagagcccagagcgatacgcaacagcgccgcaacagtccagcacatcaataacgggctaagtgtagttccggtcattaagtgactaatatagtgcccgacaccgctatctactaatacctgcttaaacgcgccgccgccagcgataataaacacaatcatcgcgatagcgcctatagaatccccaatgatatccatgatttgctcgatggtgcgtccattacgtcggcccagtgtgaaaatcgcaataacaatggcaataaacagcgcaacggcagggttaccgacaaattcaaagaagaggcgcacggtgttagttttcggtaacgtaatttcacaaacggcggcgatagccatcaggatgaccgggatcacggcagcgaaaatactgttccagaaggagggcatctcctcttcgctaaacagatgaggattaaataagccttccggtggtgctttctcaaagcgagttagcagtttagaaaacagcggtcctgcgacaataactgtcggaatggtaatgataaatccatacagtaaagtcgttccgagattagcctcaaagatagtcgcgatggcagtaggccctggatgtggcggcagaaaacagtgggttacagagagcgctgctaccattggtacgccaacatacaacaggggtaatccactacttgctacgatggtaaataccaacggcaacagcaggacaaaacccacttcaaaaaacatggcgaggcccacaaccagaccggtgatcactagcgcccattgcacgcgttttttaccaaaagtagcaatcagcgtagtggcgatacgttgtgccgcacccgtatcagaaatcagcttgcctaacatggccccgaaaccgaggatcattgccagcccgccgagcgtgctgccgataccattttgtatagagtgcaggacggcctgtgcatccatcccttcggcaaatccgacgacggcagctaccagaacgagggcaataaagccgttaactttaaagccgatcatcaggataagaagcagcgcgacgcctgccgcaataatgattaatggcatagtctttatctcttattagtgccagaaaagcagcgctttcgcgctgcacgtaggggggctgttaaacagccactaacatgccgccatcaacaaacaacaggtggccgtttacgaaatcagaggctttactagaaaggaacaccgcagcaccaatcagttcctgcggatctccccagcgtgcggcgggggtccgtttgcacaaccaggcggtgaaggcttcgtcctcaaccagtgctttagtcatttctgttttgaaatagcccggcgcaataccgttgacctgaatattgtggcgcgccagctcgacgcacatgccgcgggtgagcatttttaccgcccctttgcttgcggcataaggggtgatggtgtcacgtcccagttcgctttgcatgctgcaaatattaataactttacctgccttgcgttcaaccatgtgacgagttaccgcttggcttaccaggaacacggcggtctggtttactgcgatcacatcattccactcttgttcagggaactcagtaaaaggatgacggcgctggataccggcgttattcaccagcacatcaatggggccgatgtccttttcgatatgttcaacggcggcatcaatttcatgtttatgagtaacattaaaaggtgcggcaacggcctgaataccctcctggtggagtttttctacagcaagttctgcgcgttcggcagtaatatcattaataattatttgtgcgccatatttacccaggccggttgccagtaaaaagccaatgccctgtgcactaccggtaatcaagatattttttcctgccagactaaatagatcgttcattgtattattcctttatttatctcttagaaaacaagctggacttttgctgcctgggttttatcaccggcgaaacgtagcgcctcttccaggtcagtgaagggatattcagcactcagtaaaggcagtggattgataacgccattcgccagccaactcactgcggtattaaattcgctggtaaaacggaaagagcctctgagactaatctccttaccaatcaacgtcatcattgggaattctgccatcgcgcctcccatacctacctgcaccattacgccgcgtgcacgagtgacctccagacaggtattcacactactaggatgaccggacacttcaaagctgacatcgaaatagcctttttccgctttccagtgatccatgtcgtcgttttgtgggtttacgagcacatccgcccccatctctttgcccaggctaagggaacggggactcacatcagcacagacaatttccgcggcccccagtgttttcactgcactgacaatcaggcagccaatgggtccaacaccggaaataaatactcgcttgccctgtaactcgccggcctgatgtgcggcatgaatcgcgacggctaaaggttcggcaaaagccataaccttttcgtcagctttggccggataagggacacattggctcgtttcgaccattttataacgggtaaaaccaccatcaacatgagggaaatacatggcactgccaaaaaaacgcatatctgtacactgattctcgttatgttcaatgcagtatttgcagtgaccgcacggtttagacggattaatggctaccgtttgcccttcatgtaattcactactgtcgctatgaataactttaccgataacttcatgacctaacaccatcggtgcctttatcatgaaattacctacttttccttcctgataataatgtaaatcggaaccgcaaattccacctcgggttatttgtactaatgttccattattattccaatctatcgtctgctcggtaacggcaacagttttcttgcccgcaacaacgcaggactgtgttttcacttgcataaattcctcactggtcaggtagacacctcggaagcatttaagcggttttaactgtcattatttgtgatgaagatcacgtcagaaaattgttacattactatgttacgcataacgtgatgtgccttgtaattcttatcagtagaaataaaaaaacgtgaaattattatgccgccaggcgtagtatcgcagcaggtaagatgattcaggagattttaaatggcgggtgaaagctttattttgatgggcgttagtgggagtggtaaaacattaattggtagcaaggttgccgcgttattatctgctaaatttattgatggtgacgatcttcatccagccaaaaatatagataaaatgagccagggtattccattatctgatgaagatcgacttccctggctggaacgcttaaatgatgctagttacagtctttataaaaagaatgaaacaggatttattgtctgtagtagtttaaaaaaacagtatcgtgatattttacgcaagggtagcccccatgttcatttcctctggttagatggcgactatgaaactattctcgcgcgaatgcagcgtcgggctgggcattttatgccggtagcgttactaaaaagtcagtttgaggcactggagcgtccacaagcagatgaacaggatattgtgcgcattgatatcaaccatgatattgccaatgtcaccgaacaatgtcggcaggctgtgctggcgatacgacaaaacagaatatgtgcgaaagagggcagcgccagtgatcagcgctgcgaatgattttcaaaaatcggctttcaacaccacgcggtaacgcgccttaccgtcgcgcacatgctggatggcgtcgttaattttgctcatcgggaacagttcggtggtcggcgcaaccttgctgcgggcggcaaaacgcatcagcttacgcagctcataaggcgtgccggtagcagaaccagagacgctgcgatcgcccgcaattaacgtaaaggccggaacagacagcggcgtgagaaccgcaccgaccgtatggaaattaccgccataggtcagcgcctcaaaatagggctgccagtcgaggctgacgttgacggtgttgataatgagatcaaactgccccgccagtgctttcagtgcctgcggatcgcggctattcaccactttatcggcacccatcgccagcacttcctgctctttcgccggattagaactaaaggctgtcacctcgcatcccattgcgtgcagaagttttatagcgatatgccccagcccgccaataccaattaccccaacgcggctggtagcagtgatatggtgcatcaacagtggtttaaagaccgtgataccgccgcacaacagcggcccggcggactcgatatcaatattttctggcagtggaatcacccattgccagtccgcacgcaacttctcggcaaagccaccgcgattcataatcgtcggcaccgcaccttgctcgcagttgatctgattaccgctaatacaggcgtcgcagtgaccacagctacgcgccgtccagccaatcccgacacgctgaccgacctgcaaacctttatcctgcgcggcgctcccgagtgccaccacgcgcccaatcacctcatgcccggcaaccagcggatattgactaaatccccattcgttatcgatcatgctcagatcggaatggcagatcccgcagtaatccacctgcacttcaacatcttgtggcctcagctcaccgggatcgtactcataaacttccagttcgccgcccgcttcttttgcggcatagctttttatcatgctcattttttggtccttctctggtgttgtttgggaagtgtagagcatggcagggcggggtgcctggagtgtgacaaaggttacacatcgctgtatgcaatgctgaaaatttcagcacttagcgaggtgcgagcaagctggcgcttgcatggtggcgtgcgacaggtataatccacaacgttttccgcatacctcttcagtgccgaagtggcgaaatcggtagacgcagttgattcaaaatcaaccgtagaaatacgtgccggttcgagtccggccttcggcaccaaaagtatgtaaatagacctcaactgaggtctttttttatgcctgaaatccagtgtttatctatctttcccgctatattaactctctcaaggtcaaccgatatcaacgtacatctaccaacatatgttggtacagatgatggtatttccggttcgataatgcttgtaccaacagggagggaatacgagaaatcacaggacattgctaatgctggtacgcaatattacctgaagctaaaaacctgcacgttagccctttgtaggccagataagacgcgtcagcgtcgcatctggcataaacaaagcgcactttgctggtctgttcccctcaccctaaccctctccccggaggggcgaggggactgtccgggcacatttttagactttgtcatcagtctgagcctgccattggcaggctctggtgtccttttacgctaccatgctaataatcagcacaataatcagcccaaccacggagttgaccagctccagcagaccccaggttttcaacgtgtcttttacactcaggtcaaagtaacctttgaacaaccagaaagatgcatcgttaatgtgggtgagggtgttggaacccgcagccgtcgccagtaccagcagcgccggattcacgccaaccagctgaccagttgctggatctaggattgcagcactgataatcccggcggcggtcatcgcgctaacgacaccctgacccgtcgccagacgaattagcacagtgatcagccatgccatgatgtaggggctgatattgccgtgggacatcaacatgccgatggtgtcgccaatgccggtgtcgatgatggtctgcttcagcacgccacccgcaccgatgatcagaatcaccattgcaatactcttcaccgcgctttcaaaagcgttcatcacccactgcatgtcatgaccacgtgcggtgccaaagagtacgaatgcaaccaccatcgcaataaacattgcaatcgggctggaaccgataaagttaaccacttcccaggcaggggtatcttttaccagccagatattggcgatggtggtagagatcataatgatcgccgggatcagcggcaccagaatgctaacgccgaaagagggcagattattcatatctaccggttgatctgctttcaggaaacttggcgttgggcgctcaagattgccgaggaacttcggcaggatcagacctgcgcagattacacttgggatcgtcaccagtacgccatagatataaaccatccccatatccgcgccataagcattcaccagcgccaccggacccggctgcggtgggaacagactatgtgcggtagtggcagctgctactgccgggatcgccagtttcaggaacggaattttagcttcggcggcaataacaataaccagcggcgctaacatgataaaggccacttcatagaacatcgccagaccaaaaatcaggccgatgataatcacgctcagctgtacatagcgcagaccgagacgcgccagcagcgtatgcgctatctggtgagccgcgccggagtcgaccatcaatttaccgatgaccgcaccgaacaccacgatgatagccagttcccccagcgtgttgccgaagcccgctttcatagtgtgcagcaggctcatcaaatccatgcccgccagcatcccgacggacagcgccgccaccaacaaagccaccatactattgattttgaacttcaaattcagtaccagcatcagaccaatgccgaataccacccagagaatgttaagcacatgcataacgttttaccttacctggttgaaccgttgttattttgggcgatatgttatgtaaattggtcaaccattgttgcgatgaatgtcacatcctctgatcaataaccatcgattaccctttgctgcaatttgcagcaacaaccatgagagtgaaattcttgtgatgtggttaaccaatttcagaattcgggttgacatgtcttaccaaaaggtagaacttatacgccatctcatccgatgcaacgccacggctgcggtctggttgttcatccggatacctaaacaactccagggttccgcgtctctttgctgtggaacccactatgtgaaagaggaaaaatcatggaacagacctggcgctggtacggcccaaacgatccggtttctttagctgatgtccgtcaggcgggcgcaactggcgtggttaccgcgctgcaccatatcccgaacggcgaagtatggtccgttgaagagatcctcaaacgcaaggcgatcattgaagacgcaggcctggtgtggtctgtcgtagaaagcgtgccaattcacgaagatatcaaaacccacactggcaactatgagcagtggatcgctaactatcagcagactctgcgcaacctggcgcagtgtggcattcgcaccgtgtgctacaacttcatgccggtgctcgactggacccgtactgacctcgaatacgtgctgccagacggctccaaagctctgcgcttcgaccagatcgaattcgctgcattcgaaatgcatatcctgaaacgcccaggcgcggaagcggattacaccgaagaagaaattgctcaggcagctgaacgcttcgccactatgagcgatgaagacaaagcgcgtctgacccgtaacatcattgctggtcttccgggcgcggaagaaggctacaccctcgaccagttccgtaaacacctggagctgtacaaagatatcgacaaagcgaagctgcgcgaaaactttgccgtcttcctgaaagcgattattccagttgctgaagaagtcggcgtgcgtatggctgttcacccggacgatccgccgcgcccgatcctcggcctgccgcgcattgtttccaccattgaagatatgcagtggatggttgataccgtaaacagcatggcaaacggttttaccatgtgcaccggttcctacggcgtgcgtgctgacaacgatctggttgatatgatcaagcagttcggtccgcgtatttacttcacccatctgcgctccaccatgcgtgaagataacccgaaaaccttccacgaagcggcgcacctgaacggtgacgttgatatgtacgaagtggtgaaagcgattgttgaagaagaacaccgtcgtaaagcggaaggcaaagaagacctgatcccgatgcgtccggaccacggtcatcagatgctggacgacctgaagaagaaaaccaacccaggttactccgcaattggtcgtctgaaaggcctggccgaagttcgcggtgtcgaactggcgatccagcgcgctttctttagccgttaatatccaccggcatggctgcgcgccgtgccggttccttcttccttgccgtcactctttgaagacggattctggagtttacgatgactactattgttgacagcaatctgccggttgcccgcccgagttgggatcattctcgtctggaaagtcgcattgtgcatctcggttgcggggcgtttcaccgcgcgcaccaggcgctgtatacccatcatctgctggaaagcaccgacagcgactggggcatctgcgaagttaacctgatgccaggcaacgaccgcgtgctgatcgaaaacctgaaaaaacagcaactgctgtacaccgtagcggaaaaaggcgcagagagcaccgagctgaaaattatcggtagcatgaaagaagcgctgcatccggaaatcgatggctgcgaaggtattctcaacgcgatggcgcgtccgcaaacggcgattgtctctctaacggtcacggaaaaaggctactgcgctgatgcggcaagcggtcaactggatctcaataacccgctgatcaagcacgatctggaaaacccgactgcgccgaagtccgcgattggttacatcgtcgaagcgttgcgtctgcgtcgtgaaaaagggttgaaagcgtttacggtgatgtcctgcgataacgtgcgtgaaaacggtcatgtggcgaaggtcgcggtactggggctggctcaggcgcgtgacccgcagctggcggcatggattgaagaaaatgtcaccttcccgtgcaccatggttgaccgcatcgttccggcggcgacgccagaaaccttacaggaaattgctgaccagctgggtgtttacgacccgtgcgccattgcctgcgaaccgttccgtcagtgggtgattgaagataacttcgttaatggtcgcccggattgggataaagtgggcgcacagttcgttgcagacgttgtgccgttcgaaatgatgaagctgcgtatgctgaacggcagccactcttttctggcgtacctcggttacctcggcggctatgaaaccattgccgacaccgtgactaacccggcttatcgcaaagcggcctttgccctgatgatgcaggaacaagcgccaacgctgagcatgccggaaggtacagacctgaacgcctatgcgacgctgctgatcgagcgtttcagcaacccgtctctgcgtcaccgtacctggcagattgcgatggacggcagccagaagttaccgcagcgtctgctggacccggtgcgtctgcacctgcaaaacggcggcagctggcgtcacctggcgctgggcgtggctggctggatgcgttacacccagggcgtggatgagcagggtaatgccattgacgtggtcgacccgatgctggcggagttccagaagatcaacgcgcagtatcagggcgcagaccgcgtgaaagcgctgctgggcctgagcggtatttttgccgatgatctgccgcagaatgccgactttgttggcgcagtgacggcggcatatcagcagctgtgcgaacgcggtgcgcgcgagtgtgtggctgcgctgtaactaactgattaccctacagacttactggtcaatcaaactgatatttggttgaccagttttcgtttttttgcccacctgtacgtgccaacttccagtgctaatggtatagtttgagattaacgggggccgtaaaattgcccgttgtaggccggataaggcgttcacgccgcatccggcaaaaatttgattaaccgcacctaacggacacaacaccatgaaatctgccacctctgcgcaaagaccttaccaggaagtcggggcgatgatccgcgatctgatcataaagacgccgtacaatcctggcgaacggctgccgccggagcgtgaaattgcagaaatgcttgatgtcacgcggacggtggtacgtgaagcgctgatcatgctggagatcaaagggctggtggaagtacgccggggtgccggtatctatgttcttgataacagtggcagccagaacacagacagtccggatgccaacgtctgcaacgatgccggtccttttgagctgttacaggcgcggcagttattggagagcaacatcgccgagtttgccgctttgcaggctacccgcgaagatatcgtcaaaatgcgtcaggcattgcaactggaagagcgtgaactggcttccagtgcgccgggcagcagcgaaagcggtgacatgcagttccatctcgctattgccgaagcaacgcataacagcatgctggtggagctgttccgtcagtcctggcagtggcgggaaaacaatccaatgtggatccagttgcacagccatctggatgacagcctgtatcgcaaagagtggttgggcgatcacaaacagatcctcgccgcgttaatcaaaaaagatgcccgagcggcgaagctggcaatgtggcagcatctggaaaacgttaagcaacgtctgctggaattcagcaacgttgacgatatttattttgatggctatctgtttgatagttggccgctggataaagtcgacgcctgacttattataataagcgcaagggtaaacgttccttgcgctttcttaaattaagaagtcgcaatgagtattactttgtaaattgcagggtattgtttagctatctgtataacctgaatgttagtactcattcttcctggtagtaaggcgagattattaaagttgccatgcagcgtccggggaagtgttgggcgctgttttttttgtttcttaataatgtgttgtaagccgtagaaggcgtgtaggtcgcaccctatgcgacctacacatcagtcaggaattacccttcacgttctaccactttaatttccaccatgccgatcccgagcttacgcgggctgtgtccgaggatattcccttcgttggtactgacaggttccggcggcacaattaccagtgtgtcggcatcggttgggttatcgaaatgcagtgtggtggtggtcacttcattgcccagcacaagagtttgttcttcattgcctacgcgtaccggaataggacggctggcgttattgccgtatgctttggcggtaatcaccaggtcaaatttcttcggcagcggatgcttgtactcgatttttacttcatcgcccagctgcgcgttggaccagcggccccagctctccggacgggaaatcccgctaaactgtttcacctcttctggcgcaccggcgacgttaaagatgaaactgtcggctttgtagcgaatatcgttatcaacaatcttcagcgtatcgacattgcctttgtaacgcgccatgtcgatgaccgtatctttaaatgccgttttgccctgccatgttgttttgtcaacatgctgaacaatttgctgaccgccaagctgcccttggctgacacaccagtcggtggaaagtgccagttccggagcccagagttgtgccatcttgtagcaacggtcaacccagacgaaattgtcgcgtggagcgaaatcggccagctggaaacgcagcggtgcactgtattcgctttccggcagcggttccacgcgtttgtcactaacccgcaacagcagcggcaaacggaaatggctaccgctgaaggcaatcatgtttttctgctggtcgatggtgaactctttcatctctttagggaatttccacaggcggatgatatctggcttccacgccaatgttttctctttgatattgaggaagatttcgctcatgctctgcccggataaactgctacgaccaagtccgagatagttatcgccaccgagaatgtccagcaccgtcgcgccgttatccatcgtgttacgcttcactgccagcgtctcttgctgcggcttgtcgccacgaatgacaaaaaacaggttattgcgatcctgcttattgaggtatttccacgccgtgttgttcatcgctaaatggtcagaagagacgacgatgacggtatctttaaaccacggactcgctttgattttgttgataaacgtcgcgatgttctcctggctgcaacttaccgcgctgaaactctgattcggtttaccgtcaaaatcatattttttgcggttacaggtacgagagataaaaccatccgggtgatgggtatcgactgtcagggtaaacagactgaatcgctgaccactgcgggaaagctcttcaaactttttccacgcttcatcgagaacggtatcgtcgtagaatccccagtcgttgcgatagtgcgggtcggctaccacgcttttcagctcttcactgccgtataagtggtcgaagccatggctcttcaggaacacatctttaccggcaaaacgcagattcgcgccctgcacgaaatagttctgataaccgctgtttttcaggatatctcccagacagatgttctgcgggaagaagctggagacagaggcggaggcgttgccttcaaagggggcaaacagcggtatgccgcactgagaagccaccatgcccgcaatcgtgtaatctgttcccggcagctgctgcgtgtggctgaaatccaggccttcatttttcaacgcgcccagttcaggcgtgagatccgggaaagcctcgttatcaaaataggtccgctcgagactttcgccgtagatataaaccaggttgagtttcgggtcagggatagttttgctcggctctttataataagccgcaaagtccgggtcgccgtcgcgactctgggatttcaccagttccgttatctgacgaaatgccgggctggcgtccacgctacccagcgccagtaagagcgccagcaggctgtaaccaaaatggtgcggatgatggcgacgacggcgcaggatccagcccagcgcaccgaacaccgctgtcagccccagcacaatgccgatacccggcaaaatgtatttgctgacgccagcaccggtcaggctgttggttaaggtatagagaaccgcgtcgttaataccatcgccagtaaaatagtcgctggcaaacagggtgatatttaaaacgacaaatagccccagcaccgttaacgtggctgcaaaccaccaggtgttacgtcccgctttccatgcgtaaatcagcacagaggcgagaaaaagggcgaaagagagtagttcactcaacgggcgatcctcactaaaccgggccgtttagccaacgtttaagctttttgagaagcacaatgtaatggcgtcgccatattgctgcaattctagtgtcaaaaaaatgcgatgttgttaggaattagtttataaacagacttttttgattacggtcacttcccgtgtaacaggggtaaaaccgtccaggagcagggaaaagggcaggagagagccgcgtcagccgggtaacagctaaaacgcggcgtttcgcggttcaggaaatgaagttcagcccctgttttaacaccagatcgcaggctttggttttcaccttttctgccagcggagttgttccgatgttatccagattgagttgctgaccatctttggttttcagcaaaccctgaatgccgtccagatagttggtgtcttctttttgctcttcactgttcaggcccagcttttccagcacctggttcttgatgttttcggcatcggttacgctcgccagcttttgcttcgcgcagtattgcagaatgcctgcggcattgttcatgttatctgcgcttaaggcctggtttccgctgctaagcaagttagttaaactcgcgaggctccaaccgccttcctgtgtcgtgctgttttggttgccaagttcgctggcggcgctggagagcgcatctttccaggacgcagcatgcaccccggtggaaattaatgcgctggcggcaatggcacagcacagaagatgtttaacagttttcatcatcattactcaaggtggaattgtgtcgcagtataccgccagaaacggggattaatactctttacctgttacccggctacggtagctatcccagttgaagatcacccacaaactgttacccaggcgcatacggtccatcacgcgttcgcccagcaacttggtcatctcttccatattactgttggtcagcatcccggttgggcgtttggaagaagagcggcgatcgacgatctggttgatgatcactttttcgtatttgctttcggtctgcacgccgatctcatcgatcaccagcagatcaacgttgctcagatcgttaagcagttgttcttcgctggtaccgctattcctgaaggtatctttcatcgcgctcataatatcggccacggtgatgatcaatacggatttaccgcgtagcagcagctcgttgcagattgccgccgccagatggtttttgccggttcctggcttaccagaaaagatgaagctggcgatgttgccgtcaaactcttcgacatactggcgcgctttgcttaacgcattcatctgcccttcacactcaacgcgatagttctcaaaggaacagttctgatgcagtggacgaataccggagcggttaaaggtgcgctgcattttcatcgcccgattttcacgttcgagagcggcggagcggatcgctccttgttctttttgccaggccagtagttcttcacccgttttgaatgcgggtttgatatgggcaggcatcattttttgcaggcgttgcatcaggtcgccaacgtttttcatcgttaccctctgaatcctggtggaatttggctgtcaggttcgctgaccgtattcacatctcgtttcggcagtccgccgttgctggcacgaccgatttgcaggctgcgcgccagtttttgttgccactgcacatggtgaaagactttaccttccgcctgccagtaggcaatgaaactggccagttcttcggtggtcaccggctctcttagcgccacgccccatagcgccgccaggcggataaaatcggcatcgggttgccagtccggatacatggcgaatttccccatgggtacagcaacgggagcggcttgcggttcctgatagagttgatcgtccagagcgacatcgcttcccggacgcgccagcttttcttccagcgccagcagttcagccaggcgtgcaggcgtgacggcataaaacgccggggcattgttagcaaatacggcaaccacaccgccttcagcttttgccagaacggtttggtgatcgtgtaccagggcgtcaataccaacgacgtccggggtcaaaactctggaagacatactgtttctcaaatatggaacgatgaacgagaagggagataacttttatagtaacacacggaggagaggaggctgtctctcatccgtgtgcttaagcgaggcaattttatacgcgagggcgcttgcggtacaaccataatccaggaatggaaagaccgatggataacgcaccaacaatgctactagctgtaagaaagttggttaacagggtaatcatcaacggttcgctgtaacctaactggctgatttttaccgcgctaatcattgcggtataagcgcttatgcccgggaacatagggataacggccgccacggtaaacactttcggatgcgccagataccagcggctccattgaataccaatggtaccgaccagcatagaagccataaaggtactccactcaatattcaacccgctggtcatcaagatcattcgggaaccatgacctatcgagccaagcagcgcacaccagcgtaacgcccgcacgggaacgttgaacaccatcgcaaagccgaccgcaggaatggcggcgaggatcatatcctgcgccaacgctaacagaaattcgatcacacccatccgcgtagcccccaaatcgtcagtgccatcactacgccgacgcaggtagccagtgtcagcagactggcgatcgcccagcgtgccagtccggtattgatgtggcctttaaacatatcggcgacggcattaatcaacggaaagcccggcactagcagcagaacgctggcggccatcgcaatggtgggggtattgctgaaagtggggagttgcaaaagcaatccggaaatggtggtggcggcgaaagcggtaaggcaaaagttgatctgtggatgaagatgacgttgtgccagcagctggcggatatacatcgcggtcgtactggcaaagaaggtgatgacggcaccatcccagccaccgttattgagtttacagaaacaggcgcaagaaaggccaaccattaaggctaccagccatcttgggtaacgtaatggctgaatttggctaaatcgtttctctacgcctttgtaatccagcagatgatgctccgcaagaatcacaatgtgctggacttcagtcaccacatgcatattaatgccgcgatcgtgatttttacgtgtgcttgtcaggcattgcccatctttaatagttgtcagcactatggcgttgctagagatagaactttcgacgctgtccattcccagtgcccgacccagtcgactggaaagctcatcaaccaacgcgctttccgcaccatgttgcaaaagaaataatccacactggatacaaagccgtgttacggctcgctgttgctcagtttgcataactcgccctttgtcatagacgtgctgcgtattgttcagataatgagaatccatttgtatcatgaagcacggttgttttgcggtaggttaagatcaaaattgcgctgattaatcctggttatcgggagaagctcggtgataaaaagcgaattatctctcgccgcaaacaaactatcacatgaatattatcatcataatgaatttattgtttggcctttacgaatcaggataatagataaccgggcacgttttttaatgttaacaagctaaaaccatcagatttcattgaataaatattggttgtgtgattttgcattctgcgggaagggatatcatttaattataaattaaatgaatgtgatttctgtttttcattaagtattcctaacaacttaatgtagatattttaaatgtctccaggctatttcaccaggttatcatttgatgctaaccttctgacacatgcagtggagttgttgtgcagcaggagtatgctgatatgaaagtgaatgctaaggataatttattcgcttaatctattaatttgctggaaacatttaaggaatgaatatcctgaataaaccatcataatttttagacagtggatgtggaggaaatatgttgccaggatgctgcaaaaatggaattgttatcagtaaaatacctgttatgcaagcagggttaaaagaggtcatgaggactcacttccctgaatatgaaataatatccagcgcctctgcggaggaccttaccttattacaattacgtcgttccggattagtcattgctgatttagccggtgaaagtgaagatccacgttctgtttgtgaacattattattctttaatcagtcaatatcgggaaattcactgggttttcatggtgagtcgctcctggtattcccaggcagtagaactgctcatgtgccctacggcgacgttattgtctgatgttgaacccattgagaatctggtcaagaccgtacgttccggcaatacgcacgcagagcgtatcagcgccatgctgacctccccggcaatgactgaaactcatgattttagctatcgctccgtcattctcactcttagtgagcgcaaggtactgcggctattaggtaaaggatggggcatcaaccagatagctagtttgcttaagaaaagtaataaaactatcagcgcccaaaaaaacagtgcgatgcgtcgactggcaattcacagcaacgctgaaatgtatgcatggataaatagcgcgcagggtgcaagagaacttaacttgccttctgtttatggagatgccgcagaatggaacacagccgaattaagaagagaaatgagccacagttaaaaaaatgcgtcatgagtagtatcggtattgagagtttattcagaaagtttgcgggtaacccttataagctccatacctataccagtcaggagagttttcaggatgccatgagccggatcagctttgcggcggtcattttttctttttctgccatgagaagtgagcgcagagagggattatcttgcctgactgaactggcgattaagtttccgcgtacccggcgtttagttattgcggatgatgatattgaagctcggctgattggtagtttgagcccaagtccgctggacggtgtattaagtaaagcgagtacgctggagatttttcatcaggaactctttttgagtttaaatggtgtacgtcaggcgaccgaccgactgaacaatcagtggtacattaaccaaagccggacgttaagcccgacggagagagaaatattgcgctttatgagccgtggctacagtatgacacaaattgccgagcagcttaaacgcaatatcaaaacgatccgtgcacataaatttaatgtgatgagcaaactgggcgtcagttctgacgcagggttgttggaggccgcagatattctgttatgtatgcggcattgcgaaacaagtaatgtgttgcatccctattaatccgcatgatgccgggtttacttccccggcagtgctttcatttcagcgtacaatcgccacattgctgcacatccggtaagcgataacgctggcagcaagtgcggcgcaccagcaggccgtcgcgcagtaccacggtacgccagagtggattatcttcaccgttcgtgagcgttttctcaaaaaagagggcatggcgcaggctttcaacagtagcctcgccgagcagttgcttcatctcagtgagataccagttgatcaaataaccggtattactccagataagtttgccgttgatctctccggtcgcttctagtgcttgcacaaccggaaccagcgcctggctgattaacgtttccattcgatgctgcgggctatgtggtgttgcgtttttatcttcacacacatcgacccagaaacaggcgacgcgtccggtttcgtgaaactcagcatggaaatgttccgggctcacatctaatgccttttcctgcgtcagtagcgccagcattaatggtggcaccatcaggccgatataccattgtgcccatagactgatcagcggtttgttctcgcggatcatcatcggttggttgcgatagatatgatcggaatagaccgccagcagagaacttagcacattcggactactccattgcgccagcgtcatggcgttaagtggggcaggttcatccaggcggataaactccagcaaatgttcacgatgttttgcgatcgtcgcccgcacggcttgcgcaagcgtgggatcctgcggctggagatgcgttcgccagatgacatcttcatagagcggtgcggaacgataggccataatcgggatagtaatctaaatgataatgattgctaatcatagcgataggtttacccgatagcaagggatttatctggcttgcaaatgataaaaattatcatatgatattggttatcattatcaatgaaagagatgaaatcatgttgcaacgtacgctgggcagtggctggggagtgttgctgccgggattgctgattgcggggctgatgtatgcggatttaagcagtgatcagtggcggattgtcattctgatgggattagtattgacgccgatgatgctgtatcacaaacagttgcggcattacattttgctaccaagctgcctggcacttattgctggcatcatgctgatgataatgaatttgaatcagggatgaaaaatcaaggaagaaacaagaaaggaagtaaagataattggtgcgaggggggggacttgaacccccacgtccgtaaggacactaacacctgaagctagcgcgtctaccaattccgccaccttcgcacagtcatcttactttttttgatatcgcctcgtttggtgcgaggggggggacttgaacccccacgtccgtaagaacactaacacctgaagctagcgcgtctaccaattccgccaccttcgcccagtgcgagcaatatcaacgtggtttttggtgcgagggggggacttgaacccccacgtccgtaaggacactaacacctgaagctagcgcgtctaccaattccgccaccttcgcataccatcaattcttaaaaagaattgctaccacggaggcgcattctagtggttttcagcttttcgtcaatagttaattatcgacagaggtgtaattgctggaaaaatgtccatcaggaaactagcgtgcaggtttggtatgcatgcgggggcagatgccagatgcgacgctggcgcgtcttatctggcctacgaagggctaacgtgcaggttttgtaggtcggataaggcgttcacgccgcatccgacacggtattcggcgagataattaacctttcttcgcctggcgggtcataatggcgcgatacaccttgaagcgccctgtttgcgcgatcacttcgtggaagccaaatgtctcatccagcacgtccggataaggcaggaaggcgttcgctacaattcgcagctcgccgccgctattaagatgacgcaccgcaccgcgaatcagcgtttgcgccgcatccaggctggtttgcatcccatcgtggaacggcgggttggagatgatcatatcaaaacgacctttcacctcggaaaagacgttgctggcaaagacttcaccttcaacaccgttggccgcaagtgttgcgcggctggcttctaccgccggggcagagacatcgcacaaggtgagacgaattttcgggctatggcgcgcaaaggcaacactaagcacgcccgcgccacagccgacatccagcactttacctttcgtgtgcggagttaacgtgctgagcagcaactggctaccgacatccagaccgtcgcggctaaacacgccaggcagcgttttgaccgtcaggccatcgacgctgtattcgccccagaatttctccgcatcaaataccggctgtttttccagacgaccaaaatagaggccacagcgacgagcgctgtcgactttattcaacggcgcataatctgccagcatctgctcggcgctgcgcacgccgctgcggttctcgccaacgacaaaaatatctgtccccactggcagcagagaaagtaaattcatcaactggaactgggcttccggtttgttcttcggccagtagtaaatcagcgtatcgcaatctgcgacgtcatccgccgtggcgaccagactgaaacgggcgttatcccccatctggcggcttaatacctgccagtggtggaattgctgggtatgagcacggctggccgcggtatctaaacgcgcgggcaggtcatcctgtaagtctccggcaaacagaatacggctttgttcgaaatcatcactgtgacgcagcaagacttcacttgccggggtaaatgcagacatggaatgctcctcaattgatactggcggcgattatagccatatgttggcgcggtatcgacgaatttgctatatttgcgcccctgacaacaggagcgattcgctatgacatcccgacgagactggcagttacagcaactgggcattacccagtggagcctgcgtcgccctggcgcgttgcagggggagattgccattgcgatcccggcacacgtccgtctggtgatggtggcaaacgatcttcccgccctgactgatcctttagtgagcgatgttctgcgcgcattaaccgtcagccccgaccaggtgctgcaactgacgccagaaaaaatcgcgatgctgccgcaaggcagtcactgcaacagttggcggttgggtactgacgaaccgctaagtctggaaggcgctcaggtggcaagtccggcgctcaccgatttacgggcaaacccaacggcacgcgccgcgttatggcaacaaatttgcacatatgaacacgatttcttccctcgaaacgactgatttaccggcggcttaccacattgaacaacgcgcccacgcctttccgtggagtgaaaaaacgtttgccagcaaccagggcgagcgttatctcaactttcagttaacgcaaaacggcaaaatggcggcgtttgcgattacgcaagtggtgctggatgaagctacattgttcaatattgcggtcgatcctgactatcagcgtcagggattgggaagggcgctgctggaacatctgatcgacgaactggaaaaacgcggcgtggcgacactatggctggaagtccgtgctagtaacgctgccgccattgccctgtacgaaagtttaggctttaacgaggcgacgattcgccgcaattactaccccaccacggacggtcgcgaagacgccatcatcatggcgttgccaatcagtatgtaatacaaggtggaataatgaagtgggactggattttctttgatgccgatgaaacgctgtttacctttgacagtttcaccggcctgcagcggatgtttcttgattacagcgtcacctttaccgctgaagattttcaggactatcaggccgttaacaagccactgtgggtggattatcaaaacggcgcgatcactagtttacagcttcagcacgggcggtttgagagctgggccgaacggctgaacgtcgagccaggtaaactcaacgaagcctttattaatgcgatggcggaaatctgcacgccgctgccgggcgcggtttctctgcttaacgccattcgtggcaacgccaaaatcggcatcatcaccaacggctttagtgccttgcaacaggtgcgtctggaacgcacgggcctgcgtgattacttcgatttgctggtgatttccgaagaagttggcgttgccaaaccgaataagaaaattttcgattatgcgctggaacaggcgggcaatcctgaccgtagtcgcgtgctgatggttggcgacactgccgagtccgatattctcggtggcatcaacgccgggcttgcgacctgctggctgaatgcacaccatcgcgagcaaccagaaggcatcgcgcccacctggaccgtttctagcttgcacgaactggagcagctcctgtgtaaacactgattgcctcccccccgttgatgggtaaaatagccgcaatttttcgttttcaacaagcgcggcgcgatgccgcttactcaagaagaaagaattatgacgttgtctccttatttgcaagaggtggcgaagcgccgcacttttgccattatttctcacccggacgccggtaagactaccatcaccgagaaggtgctgctgttcggacaggccattcagaccgccggtacagtaaaaggccgtggttccaaccagcacgctaagagcgactggatggagatggaaaagcagcgtgggatctccattactacgtctgtgatgcagtttccgtatcacgattgcctggttaacctgctcgacaccccggggcacgaagacttcagcgaagatacctatcgtaccctgacggcggtggactgctgcctgatggttatcgacgccgcaaaaggtgttgaagatcgtacccgtaagctgatggaagttacccgtctgcgcgacacgccgatcctcacctttatgaacaaacttgaccgtgatatccgcgacccgatggagctgctcgatgaagttgagaacgagctgaaaatcggctgtgcgccgatcacctggccgattggctgcggcaagctgtttaaaggcgtttaccacctttataaagacgaaacctatctctatcagagcggtaaaggccacaccattcaggaagtccgcattgttaaagggctgaataacccggatctcgatgctgcggttggtgaagatctggcacagcagctgcgtgacgaactggaactggtgaaaggcgcgtctaacgagttcgacaaagagctgttccttgcgggcgaaatcactccggtattcttcggtactgcgctgggtaacttcggcgtcgatcatatgttggatggcctggtggagtgggcacctgcgccgatgccgcgtcagactgatacccgtaccgtagaagcgagcgaagataaatttaccggcttcgtatttaaaattcaggccaacatggacccgaaacaccgcgaccgcgtggcgtttatgcgtgtggtgtccggtaaatatgaaaaaggcatgaaactgcgccaggtgcgcactgcgaaagatgtggtgatctccgacgcgctgacctttatggcgggtgaccgtagccacgttgaagaagcgtatccgggcgatatcctcggcctgcacaaccacggcaccattcagatcggcgacacctttacccagggtgagatgatgaagttcaccggtattccgaacttcgcaccagaactgttccgtcgtatccgcctgaaagatccgctgaagcaaaaacagctgctcaaagggctggtacagctttccgaagagggcgcggtgcaggtgttccgtccaatctccaacaacgatctgatcgttggtgcagttggtgtgctgcagtttgatgtggtggtagcgcgcctgaagagcgaatacaacgttgaagcagtgtatgagagtgtcaacgttgccactgcccgctgggtagaatgtgcagacgcgaagaaattcgaagagttcaagcgtaagaacgaaagccaactggcgcttgatggcggcgataacctcgcttacatcgctaccagcatggtcaacctgcgcctggcacaggaacgttatccggacgttcagttccaccagacccgcgagcattaattcttgcctccagggcgcggtagccgctgcgccctgtcaatttcccttccttattagccgcttacggaatgttcttaaaacattcacttttgcttatgttttcgctgatatcccgagcggtttcaaaattgtgatctatatttaacaaagtgatgacatttctgacggcgttaaataccgttcaatgcgtagatatcagtatctaaagccgtcgattgtcattctaccgatattaataactgattcagaggctgtaatggtcgttattcatcactcatcgcttttgtgatggcgaccattgacttctgtagagggtgaagtctctccctattcagcaatgcaacctcgtgttgccaggctcaaattacgagcaaacatacaggaataaatcgatgactatgacaagactgaagattagcaaaactctgctggctgtaatgttgacctctgccgtcgcgaccggctctgcctacgcggaaaacaacgcgcagactaccaatgaaagcgcagggcaaaaagtcgatagctctatgaataaagtcggtaatttcatggatgacagcgccatcaccgcgaaagtgaaggcggccctggtggatcatgacaacatcaagagcaccgatatctctgtaaaaaccgatcaaaaagtcgtgaccctgagcggtttcgttgaaagccaggcccaggccgaagaggcagtgaaagtggcgaaaggcgttgaaggggtgacctctgtcagcgacaaactgcacgttcgcgacgctaaagaaggcagcgtgaagggctacgcgggtgacaccgccaccaccagtgaaatcaaagccaaactgctggcggacgatatcgtcccttcccgtcatgtgaaagttgaaaccaccgacggcgtggttcagctctccggtaccgtcgattctcaggcacaaagtgaccgtgctgaaagtatcgccaaagcggtagatggtgtgaaaagcgttaaaaatgatctgaaaactaagtaattcgtcgtaattcgtcctcccgaactttgtcgggaggcgcgatgtgcaccacactaaaaatatcgcattgagtgattttcacgctcatatcaagcggtgacattaactatggtaaaggagacgcttatgtttcgttggggcatcatatttctggttatcgcgttaatcgccgccgcacttgggtttggtggtctggccggtaccgctgcaggcgcagctaaaattgtctttgtcgtcgggattattctgttcctggtgagtttgttcatgggccgaaaacgaccctaaatttcagaccattaagaaaattttatccaaagccagtccagcggactggcttttgcggttttagcgaataataaattgcgttactttgtcattctttcacaacaaaaacaggaaggcagaggtggggcagcgaatacctgtaacgcttggtaatattgcgccgttgagcctaaggccgttccagcctggacgaatagctctggtgtgcgaaggcggcggacagcgtggaattttcacggctggcgtgctggatgagtttatgcgcgcgcagtttaatcctttcgatctttatctcggcacatctgccggggcgcagaacctcagcgcgtttatctgcaatcagcccggttacgcgcgcaaagtcatcatgcgctataccacaaaacgcgaatttttcgatccattgcgctttgtccgtggaggaaatcttatcgatctcgactggctggtggaggccactgcaagccagatgccgttgcaaatggataccgccgcgcggttgtttgacagcggcaaaagcttttatatgtgcgcctgtcgtcaggatgactacgcgccgaattactttttaccaaccaaacaaaactggctggatgtgattcgcgcctccagtgcgatacctggcttttatcgtagcggagtgagcctggaaggcattaactacctggatggcgggatcagtgatgcgattccggttaaagaggcggcaaggcagggcgctaaaacgttggtcgtcattcgcactgtgccgagtcaaatgtactacacgccgcagtggttcaaacgcatggaacgctggctgggtgacagtagcctgcagccgctggtcaatctggtgcagcatcatgaaaccagctatcgtgacattcagcaatttattgagaaaccaccgggcaagctgcggatattcgaaatttatccgccgaagccattacatagtatcgcgcttggcagtcggattccggcgctgcgtgaagactataaacttgggcgtttatgcggtcgttatttcctcgccacggttggcaagctattaactgaaaaagcgccgcttacccgccatctggtgccagtggtgacgccggaaagcattgtcattccgcctgcgccagtcgccaacgatacgctggttgccgaagtgagcgacgctccgcaggcgaacgacccgacatttaacaatgaggatctggcttgatttgccgttttatcgacacccactgccattttgatttcccgccgtttagtggcgatgaagaggccagcctgcaacgcgcggcacaagcgggcgtaggcaagatcattgttccggcaacagaggcggaaaattttgcccgtgtgttggcattagcggaaaattatcaaccgctgtatgccgcattgggcttgcatcctggtatgttggaaaaacatagcgatgtgtctcttgagcagctacagcaggcgctggaaaggcgtccggcgaaggtggtggcggtgggggagatcggtctggatctctttggcgacgatccgcaatttgagaggcagcagtggttactcgacgaacaactgaaactggcgaaacgctacgatctgccggtgatcctgcatagtcggcgcacgcacgacaaactggcgatgcatcttaaacgccacgatttaccgcgcactggcgtggttcacggtttttccggcagcctgcaacaggccgaacggtttgtacagctgggctacaaaattggcgtaggcggtactatcacctatccacgcgccagtaaaacccgcgatgtcatcgcaaaattaccgctggcaagcttattgctggaaaccgacgcgccggatatgccgctcaacggttttcaggggcagcctaaccgcccggagcaggctgcccgtgtgttcgccgtgctttgcgagttgcgccgggaaccggcggatgagattgcgcaagcgttgcttaataacacgtatacgttgtttaacgtgccgtaagccggataaggcgttcacgccgcatccggcagttggcgcacaatgcctgatgcgacgcttaacgcgtcttatcatgcctacaggtttgtgccgaaccgtaggccggataaggcgttcacgccgcatccggcagttggcgcacaatgcctgatgcgacgcttgtcgcgtcttatcatgcctacaagtctgtgccgaaccgtaggccggataaggcgttcacgccgcatccggcagtcggcgcataatgcctgatgcgacgcttgtcgcgtcttatcatgcctacaggtttgtgccgaaccgtaggccggataaggcgttcgcgccgcatccggcagttggcgcacaatgcctgatgcgacgcttgacgcgtcttatcaggcctacaagtctgtgccgaaccgtaggccgtatccggcatgtcacaaatagagcgccggaaatatcaaccggctcaccccgcgcacctttaacgcatcagccaacggctcaacgtcttccggcgtggcgctcgcccagctttgcgcctcgccatacacgccgtgggcatgaaacgcgttcaggcgtaccggaacatcgccgagtcccttgataaacgccgccagttcttcgatgtgttgcaaataatccacctggccagggatcaccagcaaacgcagttccgccagcttgccgcgctctgccagcaaatagatgctgcgcttaatctgctgattatcgcgtccggtgagttgttgatgacattcgctcccccacgctttgagatcgagcattgcgccgtcgcacaccgggagcaatttttcccagccggtttcgctcaacatgccgttactgtccaccagacaggtgagatggcgcagttgcggatcgtttttgatagcagtaaacagcgccaccacaaacggcagctgggtcgtggcttcaccgccactcaccgttatcccttcgataaacagcactgctttgcggacatggctaagcacttcgtccacgctcatggattgcgccatgggcgtggcatgttgcggacacctcttcaggcaggtatcacactgctcgcaaaccacagcgttccacaccactttgccgtcaacaatctgcaacgcctgatgcggacactgtggcacgcactccccacagtcattgcaacgtcccatcgtccacggattgtgacagtttttgcagcgcagattgcagccctgcaaaaacagagccagacgactgcctggcccgtcaacgcaggagaaggggataatcttactgactaaagcgcatctgctgttcatggcttatcacgcgcggctggcgttccagaatacgagtgttgcgtgcggcttcttcgcccagccaggtggtgttggtgcgactaccttcggcgcgatatttttctaaatcgctcaaacgcaccatataaccggtaacgcgaaccagatcgttaccgctgacattggcggtaaattcacgcattccggctttaaaggcaccgaggcaaagctgtaccagtgcctgcgggttacgtttgatggtttcgtcgagcgtcagaatgtcgctgatgccggaataataataagcatgatgcggggcgacagtttgcagatgggtgatcggatctggctcatcgccatacggcaaacgcgcgcccggcgtggtgccgatatcggaactgatcccgctctgtgcgtgtaacatggcgcgtttttgccagccatatttcacgggggtattggcgacaaactccgccagttgcgcgctgatgcgataacctacttcatttgcggcggcttctttaccgtagcgcgcggcaatcccttctttttcacacagcaagttaaccgcttccgccagcccatacatgccaaacattggcacaaaacgttcagggttaatcagcccttctttcaccaggaagctattctcaaagaagtgactttgttgatagaggaattcacaccgcgcatcgatgatggcgatctgctgctggcagtagtgcggtagagtgcgcgtaaagaagtcatccaggctttcgctgcgctcggcaatggctttcaggttaaggcgtaccagcgtgctgccaccacccgccagcggcagactgttgtaacagctcacaatcccgtagcccccttttgtgaaaattttatcatgcaccggaccgttggcgatgtgcggtttgctacattcacagatgttcttcgccacttccagcagcaggtcatcaggggtgatttcaggatcgtagataaaggtcaggttcggactaacctgcttcaactctgcatctgcacgtaagatcgcgcgggtaatggggctatcagacgggccgatattggcgtgcataaaggcgtctggcagggttctgtcgaggtaacgccagaaacgttttattcgaacatcgatctcgtcttgtgttagaattctaacatacggttgcaacaacgcatccagttgccccaggtagaccggcatgcttgtgacgctcggtacgtggtggtaaagaatggtcagcagagagagtgcgtcatcaagatctttcgcgccttccagctccagccattcggaaccgttcgccagaaaacgggcgtaatcgggtaagacatagcgcggtttgtacggcgcatgaccttcaaacatatcgcagattacaccttcatccagcgcgcggcgggcttcggcaggaagctgtgggtaaggcagattgttttctgcttccagtgccagaaaatggcgcttctgctccgggctaagcactgggctggtgacaatttgctggcaacgttgttgcagtgcattttcatgagaagtgggcatcttcttttccttttatgccgaaggtgatgcgccattgtaagaagtttcgtgatgttcactttgatcctgatgcgtttgccaccactgacgcattcatttgaaagtgaattatttgaaccagatcgcattacagtgatgcaaacttgtaagtagatttccttaattgtgatgtgtatcgaagtgtgttgcggagtagatgttagaatactaacaaactcgcaaggtgaattttattggcgacaagccaggagaatgaaatgactgatctgaaagcaagcagcctgcgtgcactgaaattgatggacctgaccaccctgaatgacgacgacaccgacgagaaagtgatcgccctgtgtcatcaggccaaaactccggtcggcaataccgccgctatctgtatctatcctcgctttatcccgattgctcgcaaaactctgaaagagcagggcaccccggaaatccgtatcgctacggtaaccaacttcccacacggtaacgacgacatcgacatcgcgctggcagaaacccgtgcggcaatcgcctacggtgctgatgaagttgacgttgtgttcccgtaccgcgcgctgatggcgggtaacgagcaggttggttttgacctggtgaaagcctgtaaagaggcttgcgcggcagcgaatgtactgctgaaagtgatcatcgaaaccggcgaactgaaagacgaagcgctgatccgtaaagcgtctgaaatctccatcaaagcgggtgcggacttcatcaaaacctctaccggtaaagtggctgtgaacgcgacgccggaaagcgcgcgcatcatgatggaagtgatccgtgatatgggcgtagaaaaaaccgttggtttcaaaccggcgggcggcgtgcgtactgcggaagatgcgcagaaatatctcgccattgcagatgaactgttcggtgctgactgggcagatgcgcgtcactaccgctttggcgcttccagcctgctggcaagcctgctgaaagcgctgggtcacggcgacggtaagagcgccagcagctactaagtaagatgctttacgcctgatgcgctgcgcttatcaggcctacgagacgtatctacccgtaggccggataaggcgtagacgcatccggcaaaagccgcctcatactcttttcctcgggaggttaccttgtttctcgcacaagaaattattcgtaaaaaacgtgatggtcatgcgctgagcgatgaagaaattcgtttctttatcaacggtattcgcgacaacactatctccgaagggcagattgccgccctcgcgatgaccattttcttccacgatatgacaatgcctgagcgtgtcagcctgaccatggcgatgcgagatagtggaaccgttctcgactggaaaagcctgcatctgaatggcccgattgttgataaacactccaccggtggcgtcggcgatgtgactagcctgatgttggggccgatggtcgcagcctgcggcggctatattccgatgatctctggtcgcggcctcggtcatactggcggtacgctcgacaaactggaatccatccctggcttcgacattttcccggatgacaaccgtttccgcgaaattattaaagacgtcggcgtggcgattatcggtcagaccagtagtctggctccggctgataaacgtttctacgcgacccgtgatattaccgcaaccgtggactccatcccgctgatcaccgcctctattctggcgaagaaacttgcggaaggtctggacgcgctggtgatggacgtgaaagtgggtagcggcgcgtttatgccgacctacgaactctctgaagcccttgccgaagcgattgttggcgtggctaacggcgctggcgtgcgcaccaccgcgctgctcaccgacatgaatcaggtactggcctccagtgcaggtaacgcggttgaagttcgtgaagcggtgcagttcctgacgggtgaatatcgtaacccgcgtctgtttgatgtcacgatggcgctgtgcgtggagatgctgatctccggcaaactggcgaaagatgacgccgaagcgcgcgcgaaattgcaggcggtgctggacaacggtaaagcggcagaagtctttggtcgtatggtagcggcacaaaaaggcccgaccgacttcgttgagaactacgcgaagtatctgccgacagcgatgctgacgaaagcagtctatgctgataccgaaggttttgtcagtgaaatggatacccgcgcgctggggatggcagtggttgcaatgggcggcggacgccgtcaggcatctgacaccatcgattacagcgtcggctttactgatatggcgcgtctgggcgaccaggtagacggtcagcgtccgctggcggttatccacgcgaaagacgaaaacaactggcaggaagcggcgaaagcggtgaaagcggcaattaaacttgccgataaagcaccggaaagcacaccaactgtctatcgccgtatcagcgaataacggtatactgatctgatcatttaaatttgaagcactgagtacggagaacatatgaaacgtgcatttattatggtgctggacagtttcggcatcggcgctacagaagatgcagaacgctttggtgacgtcggggctgacaccctgggtcatatcgcagaagcttgtgccaaaggcgaagctgataacggtcgtaaaggcccgctcaatctgccaaatctgacccgtctggggctggcgaaagcacacgaaggttctaccggtttcattccggcgggaatggacggcaacgctgaagttatcggcgcgtacgcatgggcgcacgaaatgagttccggtaaagataccccgtctggtcactgggaaattgccggtgtcccggttctgtttgagtggggatatttctccgatcacgaaaacagcttcccgcaagagctgctggataaactggtcgaacgcgctaatctgccgggttacctcggtaactgccactcttccggtacggtcattctggatcaactgggcgaagagcacatgaaaaccggcaagccgattttctatacctccgctgactccgtgttccagattgcctgccatgaagaaactttcggtctggataaactctacgaactgtgcgaaatcgcccgtgaagagctgaccaacggcggctacaatatcggtcgtgttatcgctcgtccgtttatcggcgacaaagccggtaacttccagcgtaccggtaaccgtcacgacctggctgttgagccgccagcaccgaccgtgctgcagaaactggttgatgaaaaacacggccaggtggtttctgtcggtaaaattgcggacatctacgccaactgcggtatcaccaaaaaagtgaaagcgactggcctggacgcgctgtttgacgccaccatcaaagagatgaaagaagcgggtgataacaccatcgtcttcaccaacttcgttgacttcgactcttcctggggccaccgtcgcgacgtcgccggttatgccgcgggtctggaactgttcgaccgccgtctgccggagctgatgtctctgctgcgcgatgacgacatcctgatcctcaccgctgaccacggttgcgatccgacctggaccggtactgaccacacgcgtgaacacattccggtactggtatatggcccgaaagtaaaaccgggcagtctgggtcatcgtgaaaccttcgcggatatcggccagactctggcaaaatattttggtacttctgatatggaatatggcaaagccatgttctgatggatttgggcggagcgttgactccgcctttgttatgtcacaaaaaggataaaacaatggctaccccacacattaatgcagaaatgggcgatttcgctgacgtagttttgatgccaggcgacccgctgcgtgcgaagtatattgctgaaactttccttgaagatgcccgtgaagtgaacaacgttcgcggtatgctgggcttcaccggtacttacaaaggccgcaaaatttccgtaatgggtcacggtatgggtatcccgtcctgctccatctacaccaaagaactgatcaccgatttcggcgtgaagaaaattatccgcgtgggttcctgtggcgcagttctgccgcacgtaaaactgcgcgacgtcgttatcggtatgggtgcctgcaccgattccaaagttaaccgcatccgttttaaagaccatgactttgccgctatcgctgacttcgacatggtgcgtaacgcagtagatgcagctaaagcactgggtattgatgctcgcgtgggtaacctgttctccgctgacctgttctactctccggacggcgaaatgttcgacgtgatggaaaaatacggcattctcggcgtggaaatggaagcggctggtatctacggcgtcgctgcagaatttggcgcgaaagccctgaccatctgcaccgtatctgaccacatccgcactcacgagcagaccactgccgctgagcgtcagactaccttcaacgacatgatcaaaatcgcactggaatccgttctgctgggcgataaagagtaattgtgtttcgctgcaaggcgattgccttgtgaagccggagcgggagactgctccggctttttagtatctattcatttttctctccagcttgaatattttcgctatacttttcagtgaaatgtgttaataaatctattcaagtatctattcacgaatctattcattaatgagcgagctgactgatcttttactgcaagggccgcgttctgccccggaattgcgccagcgtctggcaatcagtcaggcgacgttcagtcgccttgttgccagagaagatcgggtgattcgctttggtaaagcacgggcaacgcgatatgcactgctgcgtccttatcgcggaattgagcgtattcccgtctggcgggtggacgataccggaaaggcgcataaattcgccgacatccggttgtgctggccgcagggaagttgtctggtaacaggcgcagatggcgacgaacagtggtttgatggtttgccctggtatttgaccgatctccgaccgcagggctttttagggcgcgcgtggggcaggaagttagccgcgcaactgaatctgactgatgatatacgtctctggcaggaagaagatgtgctctacgccctgaccgtatttaacggtgaatatactggcggttggttggtcggggaggggaattatcagcgatggattactgcacaacaccctgcggaaattcctctggatcaaaaactcacccattacgaacagctggcaagtgatgcactggcaggagaaattgtgggttcttctgcgggcggcgagcagccaaaatttacctactatgcacaaacgccgagtggcaataaacatgtgttggtgaaattcaccgtaccacagcaaaccgcggtcagccaacgttggggtgacctgctaattgctgaatctattgccgcgcaaatcctgcgtgacggtgggatccacgccatcgagagtacggtgcttgtaacaagtaacaggcaggtattcctcgaagcggaacgctttgactgcaaaggtaacgatggtcgcttgcctattgtgagcctggaggcggtgcagagtgagtttatctcttctccgggaagctggccgcaggcaatgcgccgtttgtgtgagcaacaacttgtcactcaccagagcgtggcgcaaacagaagtgatctgggcatttgggcgacttatcgccaacagcgatatgcacgcaggtaatttaagcttttatttatctgaaccgccatttgcgctgacgcccgtctacgacatgctgccgatggtctatgcaccaaacagcgctggaatgctgcgtgatgctgccattgaggtgaagtttgatcttaacgtcagtaaaagcgcttggttaacggcgatcccgctggcgcagcagttctggcaaacggtcgccagagatccgcgtatcagcgaggcgtttcgccacattgcgcaagaaatgccggaaaaaatccggcaaatcgaagagaaagttgcccgcatgggcgggtaattaccttacagcccccgccatccatgcgcttaactcccgtagctctttttcctgttccgggaagtcaaccaacagcgcttcgcactcctgttgcagcatatctgcgcggtacaggcagccttgcagtcgtccggcgagggcttccagcggcgcggggttgaggctgtcggtaaacacctgggcgcgggtgatatggcctttttcaacgtcgaaatgcagttccacgccgccccaggtaaagcgttcatccagcagatggctgaatgccggagcctgaccgaagttccattcccagctactctggcgggcaaaggtttcggcgaagtttggcaagtctggcgttttgttcggggagatgatttccgcttccacgcgctcgccataatgggcgaaaaaggcctcggttatggcctcgcaaacctgctcatgggtgatccccggcaacagctcggtgaggttggtcacgcgggaacgtacgctcgtaatgcctttcgccgccagtttctttttatccggattgagatagtttgccaggcggctgaggtcggcattgagtagcaaggtgccgtggtggaagccgcgatctttggtttcgcgataggcgctgccactgactttgcggtcgccttcgacggttttcaccaccagatcgttacgtccggacgcttcggcgctgacgccgagcgcgttcagcgcattgagcacaatgctcgtggagatagttttatcgtactccggcttgccagccataaaggtaaagcaggtattgccgagatcgtggaacaccgcgccgccaccgctactgcgccgcgccaggcggacgttatcttcttccatccgccgggtattacactctttccacgggttctgcgcgcgaccaattactaccgtgtcggcattgcgccagagaaacagaacgcgctgcgtggcgggcatttggcgaaaaatacactcttccaccgccaggttaaaccacgggtcgtaagagtcagagatgagcaggcgtaatgtggacataacgatttcctttcttgtagtaatgggtcactcttttttctcgctttcttcctcttccggcaccggtttgctggcggctaacaggaaggggctttgctgccagcgggtgcgtttaccctgtagcagcgtgcgggtcagcactacaccgattgccagactgagcagcaacatcaggcgtaaaatgttagtggtgttatccacctgttgggcttcggtggcgagcgtatgggtgtcgagtgtcaggcgcagatagccgagcggtccgtttttacccgcaattggctcgacaatctgctggttaaaatagccgcctgcttttttaccgtcgagcgccagccggtcgcgcacttcgacgctttcgccagaacgtgcgataagatcgccttgttcgtcatacacacccgcgtcgaggatacggctttcatccgttaactgatcgaggatcgcctgaatgcgtttttcatccggactgtcggtacgcatcagcggtgcaacgttcagcgtcacctgacgcgccagggtgcgggccagttcttccagctgtggattacgctgtcgctggtggttttgactaaaccaactcgctccctgcatcagcgccactaacaaggcaagacagaacaggacaatcactgcccgatgcagccggaatttcagttttgtgcgagccatcttccaccctttgaaaatttgagacttaatgttgccagaagcaatggatacaaggtagcctcatgcgttattttccctgcttcgaacgattttacaggagccttaatgcctaacattacctggtgcgacctgcctgaagatgtctctttatggccgggtctgcctcttagtttaagtggtgatgaagtgatgccactggattaccacgcaggtcgtagcggctggctgctgtatggtcgtgggctggataaacaacgtctgacccaataccagagcaaactgggtgcggcgatggtgattgttgccgcctggtgcgtggaagattatcaggtgattcgtctggcaggtagtctcaccgcacgggctacacgcctggcccacgaagcgcagctggatgtcgccccgctggggaaaatcccgcacctgcgcacgccgggtttgctggtgatggatatggactccaccgccatccagattgaatgtattgatgaaattgccaaactggccggaacgggcgagatggtggcggaagtaaccgaacgggcgatgcgcggcgaactcgattttaccgccagcctgcgcagccgtgtggcgacgctgaaaggcgctgacgccaatattctgcaacaggtgcgtgaaaatctgccgctgatgccaggcttaacgcaactggtgctcaagctggaaacgctgggctggaaagtggcgattgcctccggcggctttactttctttgctgaatacctgcgcgacaagctgcgcctgaccgccgtggtagccaatgaactggagatcatggacggtaaatttaccggcaatgtgatcggcgacatcgtagacgcgcagtacaaagcgaaaactctgactcgcctcgcgcaggagtatgaaatcccgctggcgcagaccgtggcgattggcgatggagccaatgacctgccgatgatcaaagcggcagggctggggattgcctaccatgccaagccaaaagtgaatgaaaaggcggaagtcaccatccgtcacgctgacctgatgggggtattctgcatcctcagtggcagcctgaatcagaagtaattgctcgcccgccatcctgcgggcggcacagcattaacgaggtacaccgtggcaaaagctccaaaacgcgcctttgtttgtaatgaatgcggggccgattatccgcgctggcaggggcagtgcagtgcctgtcatgcctggaacaccatcaccgaggtgcgtcttgctgcgagcccaatggtggcgcgtaacgagcgtctcagcggctatgccggtagcgccggggtggcaaaagtccagaaactctccgatatcagccttgaagagctgccgcgtttttccaccggatttaaagagttcgaccgcgtactaggcggcggcgtggtgccaggaagtgccattctgattggcggtaaccctggtgcggggaaatccacgctgctactgcaaacgctgtgcaaactggcccagcagatgaaaacgctgtatgtcaccggcgaagagagcctgcaacaggtggcaatgcgcgctcatcgccttggcctgccgactgacaatctcaatatgttgagcgaaaccagcatcgaacagatctgcctgattgccgaagaagagcaaccgaagctgatggtaattgacagcatccaggtgatgcatatggcggatgtacagagtagccctggtagcgtggcgcaggtgcgtgaaacggcggcttatttgacacgcttcgccaaaacgcgcggtgtggcgattgtcatggtggggcacgtaaccaaagatggtagcctggctggcccgaaagtgctggaacactgtatcgactgtagcgtgcttttggatggcgatgccgactcccgttttcgcaccttgcgcagccataaaaaccgcttcggcgcggtgaatgagctgggcgtcttcgcgatgaccgaacaggggctgcgtgaagtcagcaaccctagcgcaattttcttaagtcgcggcgatgaagtgacctccggtagcagtgtgatggtggtatgggaaggaacgcgtccactgctggtggagattcaggcgctggtcgatcacagcatgatggcgaacccacgccgcgtggcagtggggctggaacaaaaccgtctggcaatcctgctggctgtgttgcaccgtcacggtggtctgcaaatggccgatcaggatgtgtttgtgaacgtggtcggcggcgtgaaggtaaccgaaaccagtgccgacttagcgttactgctggcgatggtttccagcctgcgcgacagaccgctgccgcaggatctggtggtgtttggtgaagtcgggctggcaggggagatccgcccggtgcccagcggtcaggaacgaatctctgaagcggcgaaacacggttttcgccgggcgattgttccggcggctaacgtgccgaaaaaagcgccggaagggatgcagatttttggcgttaaaaaactctccgacgcgcttagcgtgttcgacgacttataatgagatatacggagggagatatgagcagttttgattacctgaaaactgccatcaagcaacagggctgcacgctacagcaggtagctgatgccagcggtatgaccaaagggtatttaagccagttactgaatgccaaaatcaaaagccccagcgcgcaaaagctggaggcgttgcaccgttttttggggcttgagtttccccggcagaagaaaacgatcggtgtcgtattcggtaagttctacccactgcataccggacatatctaccttatccagcgcgcctgtagccaggttgacgagctgcatatcattatgggttttgacgatacccgtgaccgcgcgttgttcgaagacagtgccatgagccagcagccgaccgtgccggatcgtctgcgttggttattgcaaacttttaaatatcagaaaaatattcgcattcatgctttcaacgaagagggcatggagccgtatccgcacggctgggatgtgtggagcaacggcatcaaaaagtttatggctgaaaaagggatccagccggatctgatctacaccagcgaagaagccgatgcgccacagtatatggaacatctggggatcgagacggtgctggtcgatccgaaacgtacctttatgagtatcagcggtgcgcagatccgcgaaaacccgttccgctactgggaatatattcctaccgaagtgaagccgttttttgtgcgtaccgtggcgatccttggcggcgagagcagcggtaaatccaccctggtaaacaaacttgccaatatcttcaacaccaccagtgcgtgggaatatggccgcgattatgtctttagtcacctcggcggtgatgagatcgcattgcagtattctgactacgataaaatcgcgctgggccacgctcaatacattgattttgcggtgaaatatgccaataaagtggcatttatcgataccgattttgtcaccactcaggcgttctgcaaaaagtacgaagggcgggaacatccgttcgtgcaggcgctgattgatgaataccgtttcgatctggtgatcctgctggagaacaacacgccgtgggtggcggatggtttacgcagcctcggcagtagcgtggatcgcaaagagttccagaacttgctggtggagatgctcgaagagaacaatatcgaatttgtgcgggttgaagaggaagattacgacagtcgtttcctgcgctgcgtggaactggtgcgggagatgatgggggagcagagataaccgtgatgaaactgctcaaaggcgaggtataaaatgagtttttttgatgagttgaaaacctctctggaagaggctgtcgagattaaacaaggtttgaaaaaacctgcacgggtgacccgccacgaaattgaggatgctaaggctgttgtagaccggaaacggtgttcacgccgcatccggcattcggtgctcaatgcctgatgcgacgcttaccgcgtcttatcaggcctacagttttacaacgtattgaaattgctggttttgtaggccggataaggcgttcgcgccgcatccggcattttacgcattacttcgcaatacgcttgtacttgatacgcttcggctccagcgcgtctgcgcccagcgtgcgtttcttgtactcttcgtactcggtaaagttaccttcgaagaactcaactttaccttcatcctggtaatccagaatgtgcgtggcgatacggtcgaggaaccaacggtcgtggctgataaccatcgcacagcccgggaactccagcagggcgttttccagcgcgcgcagggtttcgatatccaggtcgttggttggttcgtcgagcagcagcatgttgccgccaacctgcagcagcttcgccagatgcagacgaccgcgctcaccaccggagagttcaccaacgcgtttaccctgatcaacccctttaaagttaaagcggccaacgtaggcgcggcttggcatctcggtgttgccgatcttcatgatatccagcccgccggaaacttcttcccaaacggttttgctgttatccatactgtcacggaactgatcaacgctcgccagtttcaccgtttcacccaaagtgatggtgccgctgtccggctgttcctgaccagagatcatacggaacagggtgcttttacccgcaccgttcggaccgatgatcccgacgatcgctcctttcgggatgctgaagctcaggtcatcaatcagcagacgatcgccataggatttacgcaggttgctgacttccagcactttatcgcccagacgcggtccaggtggaataaacagttcgttggtttcgttacgtttctgatattcggtgctgttcagttcttcaaagcgcgccagacgtgctttacctttgctctgacggcctttagtaccttgacgtacccattccagctctttctcaatgctcttacgacgcgccgcttcttgactagcttcctgcgccaggcgctgatctttctgctccagccaggaggagtagttaccttcccacggaataccttcaccgcggtcaagttcgaggatccagcctgcaacgttatcgaggaagtaacggtcgtgggtaatcgccacaacggtgccttcgaagtcgtgcaggaagcgttccagccaggccacggattcggcatccaggtggttggtcggttcgtcgagcagcagcatgtctggtttttccagcagcaggcggcacaacgctacgcgacgacgttcaccaccggagaggttagcgattttcgcgtcccagtccggcagacgtagcgcatccgccgcacgctccagctgtacgttcagattatgaccgtcgtgagcctgaatgatctcttccagacggccttgttcagcggccagcttgtcaaaatcggcatccggatcggcgtacagcgcatacacttcatccaggcgtttcagggcgttaaccacttcactaaccgcttcttcaatggactcacgcacggtgtgttccgggttcagctgcggttcctgcggcagataaccaatcttgatgtctggctgcggacgcgcttcaccttcgatgtctttatcaatgcccgccataatgcgcagcagggtggacttacccgcgccattcagacccaggacaccaatttttgccccagggaagaaactcagagagatgtttttcaaaatatgacgtttcggcggaacaactttgccgacacgatgcatggtataaacgaattgagccacgttggacttcgcctctatgtttatcgtgataatgagttttcaaaggcgaagtgtagcctttttccccgcctaatcccagccggtcgatcaccctcgcagtaaaagtaaaaaagtgtccgtaacgtggcgtaaacggcaatgactggttagcataaatctattacgcggcatgacgctgcattgatgtatttacacttagaggatgcgcttgtggaaaaagccaaacaagttacctggcggctgttggctgccggtgtctgtctgctgacggtcagcagcgtggcgcgagccgacagtctggatgagcagcgtagtcgttacgcgcaaatcaagcaggcctgggataatcgacaaatggatgtggtcgaacaaatgatgcctggactgaaggattatccgctttatccctacctggaataccgccagatcaccgatgatctgatgaatcaaccggcggtgacggtcactaactttgttcgcgctaaccccacgcttcctcccgctcgcacgctgcaatctcgtttcgtcaatgaactggcgcggcgtgaagactggcgtggcttgttagcctttagcccggaaaagcccggaactaccgaagcgcaatgtaattactactatgcgaaatggaacaccgggcagagtgaagaagcctggcaaggggcgaaagagctgtggctaaccggcaagagccagcctaacgcctgtgacaagttatttagcgtctggcgtgcgagtggtaaacaagatccgctggcgtatttagagcgtatccgtctggcgatgaaagcgggtaacacaggcctggtaacagtgctggcagggcagatgcctgccgattaccagactatcgccagcgcaatcattagtctggcgaacaaccctaatacggtactgaccttcgcgcgtacaactggcgcgaccgattttacccgtcaaatggcggcggtggcgtttgccagtgtggcgcggcaggatgctgagaatgcacggctgatgatcccaagccttgcccaggcgcagcagcttaatgaagatcagattcaggagctgcgcgatatcgtcgcctggcgtttgatgggcaacgatgtcaccgacgagcaggcgaaatggcgcgatgacgccattatgcgcagccaatctactagccttattgaacgccgtgtacgaatggcgcttggcaccggcgatcgtcgcggcctgaatacctggctggcgcgtctgcctatggaagcgaaagagaaagatgaatggcgttactggcaggcggatttattgctggaacgcggacgtgaagctgaagcaaaagagattttgcatcaactcatgcaacagcgtggtttctacccgatggttgcagcacaacgcatcggcgaagagtatgagctgaagattgataaagcgccgcagaatgttgacagcgccctgactcaggggccggagatggcgcgcgtgcgcgagttgatgtactggaatctcgataataccgcgcgtagcgagtgggccaatctggtgaagagcaagagtaaaacagagcaggctcaactggcgcggtatgctttcaacaaccaatggtgggatcttagcgttcaggcaacgatcgccgggaagctgtgggatcatctggaagagcgattcccgctggcttacaacgatcttttcaagcgctacaccagcggtaaggagatcccgcaaagctatgcgatggcgattgctcgtcaggagagcgcctggaatccgaaagtgaaaagtccggtaggggccagcggcttgatgcagattatgcctggtacagcgacccatacggtgaagatgttctctattcccggttatagcagtcctgggcaattgctggatccggaaacgaatatcaacattggcaccagttacctgcaatatgtttatcagcagtttggcaataatcgtattttctccagtgcagcttataacgccggaccagggcgggtgcgaacctggcttggcaacagcgccgggcgtatcgacgcagtggcatttgtcgagagtattccattctccgagacgcgcggttatgtgaagaacgtgctggcttatgacgcttactaccgctatttcatgggggataaaccgacgttgatgagcgccacggaatggggacgtcgttactgatccgcacgtttatgatatgctatcgtactctttagcgagtacaaccgggggaggcattttgcttcccccgctaacaatggcgacatattatggcccaacaaagtccctatagtgcagcgatggcagaacagcgtcaccaggagtggttacgttttgtcgacctgcttaagaatgcctaccaaaacgatctccatttaccgttgttaaacctgatgctgacgccagatgagcgcgaagcgttggggactcgcgtgcgtattgtcgaagagctgttgcgcggcgaaatgagccagcgtgagttaaaaaatgaactcggcgcaggcatcgcgacgattacgcgtggatctaacagcctgaaagccgcgcccgtcgagctgcgccagtggctggaagaggtgttgctgaaaagcgattgattttgtaggcctgataagacgtggcgcatcaggcatcgtgcaccgaatgccggatgcggcgtgaacgccttatccgtcctacaaatacccgtaatttcaatatgtttggtaggcatgataagacgcggcagcgtcgcatcaggcgcttaatacacggcattatgaaacggactcagcgccaggatcaccgcctggtgatagacgctggcgcgagtgagtttcccggcggtaaacacgccgatcgccccttccttacgaccaatctcatcaataccggtataacggctcatcacgggaccaagcgcctcaccttcacgcactttttccagaatcaccgcaggcaacggcaaagtagcgctacgcgcctcgccgcgctggctggcgttttcaatcaccacccaactgaaagtgctgtcaccatcgatgccagcttcaatcgccacccaaaaatcagcctctggaagtaaacggcgggcattggctacccgatttcgtgcgccagcgcgcgtttcctcactgccaaagggctgttccggtacaccgctctcgacggcaacggatgcaatatggcaggatccttcgccgaagatctcgtgaaatgcctgcagaatggcctgaattttagcgggattggtggtcgcacagacaacttggtgcataatcagcattactcagaaaattaacgttacagcagtatacggaaaaaagcatgttacaggtatacctagtccgccacggtgaaacgcagtggaacgccgagcgacgtattcagggccagtctgacagcccgctgaccgccaaaggtgagcaacaggcgatgcaggtggcaacccgtgccaaagagcttggcattacgcatatcatcagtagcgatttaggacgcacccggcgtacggcggaaatcatcgcccaggcctgcggctgtgacatcatctttgattctcgcctgcgtgaattaaacatgggtgtgctggaaaaaagacatatcgattctctgaccgaagaagaagagaactggcgtcggcagctggtcaatggcaccgttgacgggcgtattcctgaaggcgagagtatgcaggagctcagcgatcgcgtcaatgcggcactggaatcttgccgggacttaccgcagggaagccgaccgctgctggtgagtcatggtattgcactgggatgcctggtgagtacgattctcggattaccagcatgggcagagcgccgcttacgtctgcgtaactgttctattagccgcgtggattatcaggaaagcctgtggctggcgtctggctgggtcgttgaaaccgcaggggacatcagccatctggacgcccctgcattagatgagctgcagcgttaacgacggatcggaatcagcagttcacagcgtagattaattgggcgatctcccgctttggcatcttctgccgggtagtatcgctcaatatcctgacctttacggcgcgtcaggttgagcattggcatgcacgttccgtataccgtcaggataaactcctgcacgccggttcccagaccttcataggtaaacatcacatattcgccgccctgcagcatcaccggatgccccgtcagtacatagccatctgcctgatcctgggctaacgcggtggtatagaatacctcttgctcgtcgtctttatcctgactcggacgcgtttcattcaggccgtagagcaccggcggaatggtcggcgcgttgccgagaaaatcgtgccagaactgataacgcatttcatggcggaaatcagagatttgctccaggctacaggagtagctctgggtaacaccaatcagcggcgtatcttccagggtgacaaatttgtgctctggcatagtgaattcacccaggcgtagcggcgggcgaataccaaaggcgctccattcaggagaacggcggtaaagtgcaggagtctgggcaaactgcttcttgaatgcgcgggtaaatgtctgttgagagtcgaagcggtattgcagcgcgatgtccagaatcggacgcgcagtcaggcgtagtgcgaccgcgcttttgctcaaacgacgagcacgaatatacgcgccaatagcatggccagtgacatctttaaacattctctgtaagtgccacttggaataacctgctttcgccgctacattgtcgaggctcaggggctgatccagatgaccttccagccagattaaaaggtcgcgaataatgccggcctgatccataaaatatcctcatcctttcaacaacgagcacctgacatcaggtaattggataatagcattttttgctgttttagcattcagtgtttttttcttagtagagtatgttttagggcttgacggaaataaaagtattgagattttgttcttaatcaatatgttatttaccgtgacgaactaattgctcgtgtaatagataaaaatggtaacaatatgaaatacaagcatttgatcctgtctttaagcctgataatgctggggccattggctcatgcagaagagattggtagcgtcgacaccgtatttaaaatgatcggcccggatcacaaaattgttgtggaagcctttgatgatcccgatgtgaaaaatgtcacctgttatgtgagccgggcgaaaaccggtggtattaaagggggattgggtctggcggaagatacctccgatgcggccatttcttgtcagcaagtcgggccgattgaactgagcgatcgtattaaaaacggcaaagctcagggcgaggtagtattcaaaaaacgcacgtccctggtctttaagagcttacaggtcgtgcgcttttatgatgccaaacgcaacgcgctcgcttatctggcttactccgacaaagttgtagaaggtagcccgaaaaacgcgattagcgcggttcctgtcatgccgtggcggcaataacagaggcgatttatgcaacgggaaacggtctggttagtggaagatgagcaagggatagccgacacgctggtctacatgttgcagcaggaaggttttgccgtcgaggtctttgagcgaggcttgccggtgctggataaagctcgcaagcaggtacccgacgtcatgattctcgatgttggtctgccggatattagcggctttgaattgtgccgccagttactggcgctccatccggcgttacctgtactgttcctgacggcccgaagtgaagaggtcgatcgcctgcttgggctggaaattggtgctgacgactacgtggctaaaccgtttagtccccgcgaagtgtgcgccagggtgcgcaccttactgcgtcgggtgaagaagttcagcacgccgtctcccgtcatccgtattggacattttgaattgaatgaacccgcggcgcagatcagctggtttgacacgccattagcgctgactcggtatgagtttttattgttgaagacgttactcaagagtccgggccgcgtctggtcccgccagcaactgatggatagcgtatgggaagatgcgcaggacacctacgatcgcaccgtcgatacccacattaaaacgctgcgtgccaagctgcgcgccatcaaccccgatcttagtccgattaatactcatcgcggcatgggatatagcctgaggggcctgtaatgcgtatcggcatgcggttgttgctgggctattttttactggtggcggtggcagcctggttcgtactggccatttttgtcaaagaagttaaaccgggcgtgcgaagagcaacggaggggacgttgatcgacaccgcaacgttgctggcggagctggcgcgtcccgatttgctctctggggacccaacgcatgggcaactggcgcaggcgtttaatcagctacaacatcgcccgtttcgcgccaatatcggtggcattaacaaagtgcgcaatgaatatcatgtctatatgaccgatgcgcagggcaaagtattgttcgatagcgcaaataaagccgttggacaggattatagccgctggaatgacgtctggctaacgttgcgtggtcagtatggtgcgcgcagcacgttgcaaaatcctgccgatcccgaaagttctgtgatgtatgttgccgcaccgattatggacggcagccggcttattggcgttttgagcgtaggcaaaccgaacgcggcgatggctccggtcattaagcgtagcgagcggcgaattttatgggccagcgccattttgttggggattgcactggtgattggcgcaggcatggtttggtggatcaaccgctctattgcccggctcactcgctatgctgattccgtcactgacaataagcccgttcctctccccgatctcggtagtagcgagttgcgtaaactcgcgcaggcgctggaaagtatgcgcgtgaagctggaagggaaaaactatattgagcagtatgtttacgcattaactcatgagctaaaaagcccactggcggcgattcgtggagcggcggaaattttacgcgaaggtccgccgccggaagtggtggctcgttttactgacaacattctgacgcaaaatgcgcgtatgcaggcattggtagaaacgttactacgccaggcaagactggagaatcgtcaggaagtcgttctgactgctgttgatgtggcggcattattccgccgcgtcagcgaagcgcgcaccgtgcagttggcagaaaaaaaaatcactctgcatgttacgcccaccgaggttaacgttgctgctgaaccggcgttactggagcaggcgctgggaaatttactggataacgccatcgattttacccccgagagcggttgcatcacgctaagcgccgaagtggatcaggaacacgtcacgcttaaggtgctggataccggtagtggtattcctgactacgcgcttagtcgtatttttgaacgcttttactctttgcctcgtgcaaatgggcaaaaaagcagcggtctggggttggcgttcgtcagtgaggtcgcccgtttgtttaacggcgaagtcacgctgcgcaacgtgcaggaaggtggcgtgctggccagccttcgacttcaccgtcacttcacataacttcaaattcttcccacatagtcttcgtatcctgctgccattgcaaaggagaagactatgttgaaatcccccctgttctggaaaatgactagcctgtttggtgcagtattgctgttgttgattccgataatgctgattcggcaggtgattgtcgaacgtgctgattaccgtagcgatgtggaagatgcgattcgccaaagtaccagcgggccgcaaaaactcgttgggccgctcatcgctattcctgtgaccgagctttatacggtgcaggaagaggataaaaccgtggagcggaaacgaagttttatccatttttggttacctgagagtttgatggttgatggcaatcagaacgtggaagaacgcaagatagggatttataccggtcaggtctggcacagtgatttaacgttaaaagccgatttcgatgttagccgtcttagcgaactcaacgcgccaaatatcaccttaggcaagccatttattgtgattagcgtcggggatgcgcgtggtattggtgtggtgaaagcgcctgaagttaacggaacggcgctgaccattgaacccggcaccgggttagagcaaggcgggcagggcgtgcatatccctttacctgaaggggactggcggaagcagaacctgaagctgaatatggccctgaatttaagcggtaccggcgatctttctgtggtgcctggcgggcgtaatagcgaaatgaccttaaccagcaactggccgcatcccagttttttaggtgattttctaccagccaaacgggaagttagcgagagtggttttcaggcgcactggcaaagcagctggtttgctaataatctcggtgagcgttttgctagtggcaatgataccggctgggaaaacttcccggcgtttagcgtcgcagtaacgacgccagccgatcaataccaattaactgaccgggcgactaagtacgccattctgctgattgcactgacttttatggcgttctttgtttttgaaacgctcaccgcgcaacgtttacacccaatgcaatatttgctggtggggcttagtttggtgatgttttatttgctcttgctggcgctttctgaacataccggttttaccgtggcatggataatcgccagtctgattggggcgataatgaacggtatttatttgcaagcggtattgaaaggttggtgcaacagcatgttgtttaccctcgcgctgttgttgctggatggtgtgatgtggggactgctcaactctgccgatagcgcgctgttgttgggaaccagtgtgctggtggtggcgctggccggcatgatgtttgtgacccgtaatatcgactggtatgcgtttagtctgccgaaaatgaaagccagtaaagaagttacaacggacgatgagttacgtatctggaaataaggttgaaaaataaaaacggcgctaaaaagcgccgttttttttgacggtggtaaagccgattaatcttccagatcaccgcagaagcgataaccttcaccgtgaatggtggcgatgatttccggcgtatccggcgtagattcgaaatgtttacgaatacggcggatcgtcacgtctacagtacggtcgtgcggtttcagctcacggccggtcattttcttcagcagttcagcacgggactgaattttgcctgggttttcacagaagtgaagcatggcgcggaactcgctgcgcggcagcttgtactgctcgccatcagggccgatcaagctacggctgttgatgtccagttcccaaccattgaacttgtagctttcaacgctacgacgttcttcgctgacagtacccagattcatggtacgggacagtaggttgcgtgcacgaatcgtcagttcacgcgggttgaacggtttggtgatgtagtcatctgcaccgatttcgaggccgagaattttatcgacttcgttgtcacggccagtcaggaacatcaacgcaacattcgcctgctcgcgcagttcacgcgctaacagaagaccgttcttacccggcagattgatatccatgatcaccaggttgatgtcatattcagagaggatctgatgcatttccgcgccatctgtcgcttcgaaaacatcatagccttccgcttcgaaaatacttttcaacgtgttgcgtgttaccaactcgtcttcaacgataagaatgtgcggggtctgcatgtttgctacctaaattgccaactaaatcgaaacaggaagtacaaaagtccctgacctgcctgatgcatgctgcaaattaacatgatcggcgtaacatgactaaagtacgtaattgcgttcttgatgcactttccatcaacgtcaacaacatcattagcttggtcgtgggtactttccctcaggacccgacagtgagtaaaacggctgtcatcctaaccattttaacagcaacataacaggctaagaggggccggacacccaataaaactacgcttcgttgacatatatcaagttcaattgtagcacgttaacagtttgatgaaatcatcgtatctaaatgctagctttcgtcacattattttaataatccaactagttgcatcatacaactaataaacgtggtgaatccaattgtcgagatttattttttataaaattatcctaagtaaacagaaggatatgtagcattttttaacaactcaaccgttagtacagtcaggaaatagtttagccttttttaagctaagtaaagggctttttctgcgacttacgttaagaatttgtaaattcgcaccgcgtaataagttgacagtgatcacccggttcgcggttatttgatcaagaagagtggcaatatgcgtataacgattattctggtcgcacccgccagagcagaaaatattggggcagcggcgcgggcaatgaaaacgatggggtttagcgatctgcggattgtcgatagtcaggcacacctggagccagccacccgctgggtcgcacatggatctggtgatattattgataatattaaagttttcccgacattggctgaaagcttacacgatgtcgatttcactgtcgccaccactgcgcgcagtcgggcgaaatatcattactacgccacgccagttgaactggtgccgctgttagaggaaaaatctagttggatgagccatgccgcgctggtgtttggtcgcgaagattccgggttgactaacgaagagttagcgttggctgacgttcttactggtgtgccgatggtggcggattatcctagcctcaatctggggcaggcggtgatggtctattgctatcaattagcaacattaatacaacaaccggcgaaaagtgatgcaacggcagaccaacatcaactgcaagctttacgcgaacgagccatgacattgctgacgactctggcagtggcagatgacataaaactggtcgactggttacaacaacgcctggggcttttagagcaacgagacacggcaatgttgcaccgtttgctgcatgatattgaaaaaaatatcaccaaataaaaaacgccttagtaagtatttttc

SEQ ID NO: 9 - protein, 275 aa, Methanomethylophilus sp.
  source 1..275: note = 1R26
MAEHFTDAQIQRLREYGNGTYKDMEFADVSAREKAFTKLMSDASRDNESALKGMIAHPARQGLSRLMNDIADALVADGFIEVRTPIIISKDALAKMTITPDKPLFKQVFWIDDKRALRPMLAPSLYTVMRSLRDHTDGPVKIFEMGSCFRKESHSGMHLEEFTMLNLVDMGPAGDATESLKKYIGIVMKAAGLPDYQLVHEESDVYKETIDVEINGQEVCSAAVGPHYLDAAHDVHEPWAGAGFGLERLLTIRQGYSTVMKGGASTTYLNGAKMD

SEQ ID NO: 10 - protein, 275 aa, synthetic construct
  source 1..275: note = aaRS with selectivity to CbzK
MAEHFTDAQIQRLREYGNGTYKDMEFADVSAREKAFTKLMSDASRDNESALKGMIAHPARQGLSRLMNDIADALVADGFIEVRTPIIISKDALAKMTITPDKPLFKQVFWIDDKRALRPMLAPSLGTVLRSLRDHTDGPVKIFEMGSCFRKESHSGMHLEEFTMLNLVDMGPAGDATESLKKYIGIVMKAAGLPDYQLVHEESDVYKETIDVEINGQEVCSAAVGPHYLDAAHDVHEPWAGAGFGLERLLTIRQGYSTVMKGGASTTYLNGAKMD

SEQ ID NO: 11 - protein, 275 aa, synthetic construct
  source 1..275: note = aaRS with selectivity to CbzK
MAEHFTDAQIQRLREYGNGTYKDMEFADVSAREKAFTKLMSDASRDNESALKGMIAHPARQGLSRLMNDIADALVADGFIEVRTPIIISKDALAKMTITPDKPLFKQVFWIDDKRALRPMLAPSLYTVARSLRDHTDGPVKIFEMGSCFRKESHSGMHLEEFTMLNLVDMGPAGDATESLKKYIGIVMKAAGLPDYQLVHEESDVFKETIDVEINGQEVCSAAVGPHYLDAAHDVHEPWAGAGFGLERLLTIRQGYSTVMKGGASTTYLNGAKMD

SEQ ID NO: 12 - protein, 275 aa, synthetic construct
  source 1..275: note = aaRS with selectivity to AllocK
MAEHFTDAQIQRLREYGNGTYKDMEFADVSAREKAFTKLMSDASRDNESALKGMIAHPARQGLSRLMNDIADALVADGFIEVRTPIIISKDALAKMTITPDKPLFKQVFWIDDKRALRPMLAPSLYTVMRSLRDHTDGPVKIFEMGSCFRKESHSGMHLEEFTMLQLVDMGPAGDATESLKKYIGIVMKAAGLPDYQLVHEESDVFKETIDVEINGQEVCSAAVGPHYLDAAHDVHEPWAGAGFGLERLLTIRQGYSTVMKGGASTTYLNGAKMD

SEQ ID NO: 13 - protein, 275 aa, synthetic construct
  source 1..275: note = aaRS with selectivity to Bta
MAEHFTDAQIQRLREYGNGTYKDMEFADVSAREKAFTKLMSDASRDNESALKGMIAHPARQGLSRLMNDIADALVADGFIEVRTPIIISKDALAKMTITPDKPLFKQVFWIDDKRALRPMLAPSLYTVMRSLRDHTDGPVKIFEMGSCFRKESHSGMHLEEFTMLSLMDMGPAGDATESLKKYIGIVMKAAGLPDYQLVHEESDVFKETIDVEINGQEVCSAGVGPHYLDAAHDVHEPWAGAGFGLERLLTIRQGYSTVMKGGASTTYLNGAKMD

SEQ ID NO: 14 - protein, 275 aa, synthetic construct
  source 1..275: note = aaRS with selectivity to NMH
MAEHFTDAQIQRLREYGNGTYKDMEFADVSAREKAFTKLMSDASRDNESALKGMIAHPARQGLSRLMNDIADALVADGFIEVRTPIIISKDALAKMTITPDKPLFKQVFWIDDKRALRPMMAPSIFTVARSLRDHTDGPVKIFEMGSCFRKESHSGMHLEEFTMLNLFDMGPAGDATESLKKYIGIVMKAAGLPDYQLVHEESDVYKETIDVEINGQEVCSAAVGPHYLDAAHDVHEPWAGAGFGLERLLTIRQGYSTVMKGGASTTYLNGAKMD

SEQ ID NO: 15 - DNA, 72 bp, synthetic construct
  source 1..72: mol_type = other DNA; note = AlvtRNA^NPyl(8)
gggggacggtccggcgaccagcgggtctctaaaacctagccttgcggggttcgacaccccggtctctcgcca

SEQ ID NO: 16 - protein, 323 aa, Archaeoglobus fulgidus
MDITEKLRLITRNAEEVVTEEELRQLIETKEKPRAYVGYEPSGEIHLGHMMTVQKLMDLQEAGFEIIVLLADIHAYLNEKGTFEEIAEVADYNKKVFIALGLDESRAKFVLGSEYQLSRDYVLDVLKMARITTLNRARRSMDEVSRRKEDPMVSQMIYPLMQALDIAHLGVDLAVGGIDQRKIHMLARENLPRLGYSSPVCLHTPILVGLDGQKMSSSKGNYISVRDPPEEVERKIRKAYCPAGVVEENPILDIAKYHILPRFGKIVVERDAKFGGDVEYASFEELAEDFKSGQLHPLDLKIAVAKYLNMLLEDARKRLGVSV

SEQ ID NO: 17 - protein, 323 aa, synthetic construct
  source 1..323: note = aaRS with selectivity to p-I-Phe
MDITEKLRLITRNAEEVVTEEELRQLIETKEKPRAIVGYEPSGEIHLGHMMTVQKLMDLQEAGFEIIVMLADILAYLNEKGTFEEIAEVADYNKKVFIALGLDESRAKFVLGSEYELSRDYVLDVLKMARITTLNRARRSMDEVSRRKEDPMVSQMIYPLMQALTGAHLGVDLAVGGIDQRKIHMLARENLPRLGYSSPVCLHTPILVGLDGQKMSSSKGNYISVRDPPEEVERKIRKAYCPAGVVEENPILDIAKYHILPRFGKIVVERDAKVGGDVEYASFEELAEDFKSGQLHPGRLKIAVAKYLNMLLEDARKRLGVSV

SEQ ID NO: 18 - protein, 323 aa, synthetic construct
  source 1..323: note = aaRS with selectivity to p-Az-Phe
MDITEKLRLITRNAEEVVTEEELRQLIETKEKPRATVGYEPSGEIHLGHMMTVQKLMDLQEAGFEIIVLLADILAYLNEKGTFEEIAEVADYNKKVFIALGLDESRAKFVLGSEYELSRDYVLDVLKMARITTLNRARRSMDEVSRRKEDPMVSQMIYPLMQALTGAHLGVDLAVGGIDQRKIHMLAREKLPRLGYSSPVCLHTPILVGLDGQKMSSSKGNYISVRDPPEEVERKIRKAYCPAGVVEENPILDIAKYHILPRFGKIVVERDAKFGGDVEYASFEELAEDFKSGQLHPLDLKIAVAKYLNMLLEDARKRLGVSV

SEQ ID NO: 19 - protein, 323 aa, synthetic construct
  source 1..323: note = aaRS with selectivity to 0-methyl-tyrosine
MDITEKLRLITRNAEEVVTEEELRQLIETKEKPRAIVGYEPSGEIHLGHMMTVQKLMDLQEAGFEIIVLLADILAYLNEKGTFEEIAEVADYNKKVFIALGLDESRAKFVLGSEYELSRDYVLDVLKMARITTLNRARRSMDEVSRRKEDPMVSQMIYPLMQALTGAHLGVDLAVGGIDQRKIHMLARENLPRLGYSSPVCLHTPILVGLDGQKMSSSKGNYISVRDPPEEVERKIRKAYCPAGVVEENPILDIAKYHILPRFGKIVVERDAKFGGDVEYASFEELAEDFKSGQLHPLDLKIAVAKYLNMLLEDARKRLGVSV

SEQ ID NO: 20 - DNA, 75 bp, synthetic construct
  source 1..75: mol_type = other DNA; note = Af-tRNATyr(A01)CUA
cccgccctagctcagaggtagagcgtgcttctctaaaaagcatggtccccggttcaaatcctgggggcgggacca

SEQ ID NO: 21 - protein, 454 aa, Methanosarcina mazei
MDKKPLNTLISATGLWMSRTGTIHKIKHHEVSRSKIYIEMACGDHLVVNNSRSSRTARALRHHKYRKTCKRCRVSDEDLNKFLTKANEDQTSVKVKVVSAPTRTKKAMPKSVARAPKPLENTEAAQAQPSGSKFSPAIPVSTQESVSVPASVSTSISSISTGATASALVKGNTNPITSMSAPVQASAPALTKSQTDRLEVLLNPKDEISLNSGKPFRELESELLSRRKKDLQQIYAEERENYLGKLEREITRFFVDRGFLEIKSPILIPLEYIERMGIDNDTELSKQIFRVDKNFCLRPMLAPNLYNYLRKLDRALPDPIKIFEIGPCYRKESDGKEHLEEFTMLNFCQMGSGCTRENLESIITDFLNHLGIDFKIVGDSCMVYGDTLDVMHGDLELSSAVVGPIPLDREWGIDKPWIGAGFGLERLLKVKHDFKNIKRAARSESYYNGISTNL

SEQ ID NO: 22 - protein, 454 aa, synthetic construct
  source 1..454: note = aaRS with selectivity to Bpa
MDKKPLNTLISATGLWMSRTGTIHKIKHHEVSRSKIYIEMACGDHLVVNNSRSSRTARALRHHKYRKTCKRCRVSDEDLNKFLTKANEDQTSVKVKVVSAPTRTKKAMPKSVARAPKPLENTEAAQAQPSGSKFSPAIPVSTQESVSVPASVSTSISSISTGATASALVKGNTNPITSMSAPVQASAPALTKSQTDRLEVLLNPKDEISLNSGKPFRELESELLSRRKKDLQQIYAEERENYLGKLEREITRFFVDRGFLEIKSPILIPLEYIERMGIDNDTELSKQIFRVDKNFCLRPMLTPNLYNYLRKLDRALPDPIKIFEIGPCYRKESDGKEHLEEFTMLTFTQMGSGCTRENLESIITDFLNHLGIDFKIVGDSCMVYGDTLDVMHGDLELSSAVVGPIPLDREWGIDKPCIGAGFGLERLLKVKHDFKNIKRAARSESYYNGISTNL

SEQ ID NO: 23 - protein, 454 aa, synthetic construct
  source 1..454: note = aaRS with selectivity to Bta
MDKKPLNTLISATGLWMSRTGTIHKIKHHEVSRSKIYIEMACGDHLVVNNSRSSRTARALRHHKYRKTCKRCRVSDEDLNKFLTKANEDQTSVKVKVVSAPTRTKKAMPKSVARAPKPLENTEAAQAQPSGSKFSPAIPVSTQESVSVPASVSTSISSISTGATASALVKGNTNPITSMSAPVQASAPALTKSQTDRLEVLLNPKDEISLNSGKPFRELESELLSRRKKDLQQIYAEERENYLGKLEREITRFFVDRGFLEIKSPILIPLEYIERMGIDNDTELSKQIFRVDKNFCLRPMLAPNLYNYLRKLDRALPDPIKIFEIGPCYRKESDGKEHLEEFTMLSFMQMGSGCTRENLESIITDFLNHLGIDFKIVGDSCMVFGDTLDVMHGDLELSSAGVGPIPLDREWGIDKPWIGAGFGLERLLKVKHDFKNIKRAARSESYYNGISTNL

SEQ ID NO: 24 - protein, 454 aa, synthetic construct
  source 1..454: note = aaRS with selectivity to CbzK
MDKKPLNTLISATGLWMSRTGTIHKIKHHEVSRSKIYIEMACGDHLVVNNSRSSRTARALRHHKYRKTCKRCRVSDEDLNKFLTKANEDQTSVKVKVVSAPTRTKKAMPKSVARAPKPLENTEAAQAQPSGSKFSPAIPVSTQESVSVPASVSTSISSISTGATASALVKGNTNPITSMSAPVQASAPALTKSQTDRLEVLLNPKDEISLNSGKPFRELESELLSRRKKDLQQIYAEERENYLGKLEREITRFFVDRGFLEIKSPILIPLEYIERMGIDNDTELSKQIFRVDKNFCLRPMLAPNLGNYLRKLDRALPDPIKIFEIGPCYRKESDGKEHLEEFTMLNFCQMGSGCTRENLESIITDFLNHLGIDFKIVGDSCMVYGDTLDVMHGDLELSSAVVGPIPLDREWGIDKPWIGAGFGLERLLKVKHDFKNIKRAARSESYYNGISTNL

SEQ ID NO: 25 - protein, 454 aa, synthetic construct
  source 1..454: note = aaRS with selectivity to CbzK
MDKKPLNTLISATGLWMSRTGTIHKIKHHEVSRSKIYIEMACGDHLVVNNSRSSRTARALRHHKYRKTCKRCRVSDEDLNKFLTKANEDQTSVKVKVVSAPTRTKKAMPKSVARAPKPLENTEAAQAQPSGSKFSPAIPVSTQESVSVPASVSTSISSISTGATASALVKGNTNPITSMSAPVQASAPALTKSQTDRLEVLLNPKDEISLNSGKPFRELESELLSRRKKDLQQIYAEERENYLGKLEREITRFFVDRGFLEIKSPILIPLEYIERMGIDNDTELSKQIFRVDKNFCLRPMLAPNLYNYARKLDRALPDPIKIFEIGPCYRKESDGKEHLEEFTMLNFVQMGSGCTRENLESIITDFLNHLGIDFKIVGDSCMVFGDTLDVMHGDLELSSAVVGPIPLDREWGIDKPWIGAGFGLERLLKVKHDFKNIKRAARSESYYNGISTNL

SEQ ID NO: 26 - protein, 454 aa, synthetic construct
  source 1..454: note = aaRS with selectivity to NMH
MDKKPLNTLISATGLWMSRTGTIHKIKHHEVSRSKIYIEMACGDHLVVNNSRSSRTARALRHHKYRKTCKRCRVSDEDLNKFLTKANEDQTSVKVKVVSAPTRTKKAMPKSVARAPKPLENTEAAQAQPSGSKFSPAIPVSTQESVSVPASVSTSISSISTGATASALVKGNTNPITSMSAPVQASAPALTKSQTDRLEVLLNPKDEISLNSGKPFRELESELLSRRKKDLQQIYAEERENYLGKLEREITRFFVDRGFLEIKSPILIPLEYIERMGIDNDTELSKQIFRVDKNFCLRPMMAPNIFNYARKLDRALPDPIKIFEIGPCYRKESDGKEHLEEFTMLNFFQMGSGCTRENLESIITDFLNHLGIDFKIVGDSCMVYGDTLDVMHGDLELSSAVVGPIPLDREWGIDKPWIGAGFGLERLLKVKHDFKNIKRAARSESYYNGISTNL

SEQ ID NO: 27 - RNA, 72 nt, Methanosarcina mazei
  source 1..72: mol_type = tRNA
ggaaacctgatcatgtagatcgaatggactctaaatccgttcagccgggttagattcccggggtttccgcca

SEQ ID NO: 28 - protein, 306 aa, Methanococcus jannaschii
MDEFEMIKRNTSEIISEEELREVLKKDEKSAYIGFEPSGKIHLGHYLQIKKMIDLQNAGFDIIILLADLHAYLNQKGELDEIRKIGDYNKKVFEAMGLKAKYVYGSEFQLDKDYTLNVYRLALKTTLKRARRSMELIAREDENPKVAEVIYPIMQVNDIHYLGVDVAVGGMEQRKIHMLARELLPKKVVCIHNPVLTGLDGEGKMSSSKGNFIAVDDSPEEIRAKIKKAYCPAGVVEGNPIMEIAKYFLEYPLTIKRPEKFGGDLTVNSYEELESLFKNKELHPMDLKNAVAEELIKILEPIRKRL

SEQ ID NO: 29 - protein, 306 aa, synthetic construct
  source 1..306: note = aaRS with selectivity to 3-Nitro-Tyr
MDEFEMIKRNTSEIISEEELREVLKKDEKSAHIGFEPSGKIHLGHYLQIKKMIDLQNAGFDIIILLADLTAYLNQKGELDEIRKIGDYNKKVFEAMGLKAKYVYGSEFQLDKDYTLNVYRLALKTTLKRARRSMELIAREDENPKVAEVIYPIMQVNHAHYRGVDVAVGGMEQRKIHMLARELLPKKVVCIHNPVLTGLDGEGKMSSSKGNFIAVDDSPEEIRAKIKKAYCPAGVVEGNPIMEIAKYFLEYPLTIKRPEKFGGDLTVNSYEELESLFKNKELHPMDLKNAVAEELIKILEPIRKRL

SEQ ID NO: 30 - protein, 306 aa, synthetic construct
  source 1..306: note = aaRS with selectivity to p-Az-Phe
MDEFEMIKRNTSEIISEEELREVLKKDEKSALIGFEPSGKIHLGHYLQIKKMIDLQNAGFDIIIVLADLHAYLNQKGELDEIRKIGDYNKKVFEAMGLKAKYVYGSEWMLDKDYTLNVYRLALKTTLKRARRSMELIAREDENPKVAEVIYPIMQVNGAHYLGVDVAVGGMEQRKIHMLARELLPKKVVCIHNPVLTGLDGEGKMSSSKGNFIAVDDSPEEIRAKIKKAYCPAGVVEGNPIMEIAKYFLEYPLTIKRPEKFGGDLTVNSYEELESLFKNKELHPMDLKNAVAEELIKILEPIRKRL

SEQ ID NO: 31 - RNA, 77 nt, Methanococcus jannaschii
  source 1..77: mol_type = tRNA
ccggcggtagttcagcagggcagaacggcggactctaaatccgcatggcaggggttcaaatcccctccgccggacca

SEQ ID NO: 32 - protein, 275 aa, Methanomassiliicoccus luminyensis
  source 1..275: note = 1
MDTRLTPAQAQRIREMGGTVDPSLAFSSEAERESAFQRISADLQGANLAKIRRCAEAPERHPIGSLENTLACALAAKGFIEVKTPMMIPADGLVKMGIDESHPLWNQVFWVGPKKALRPMLAPNLYFLMRHLRRSVPAPLLLFEIGPCFRKESRGSNHLEEFTMLNLVELAPQADATERLKEHIATVMNAVGLPYELVVEGSEVYGTTIDVEVDGVELASGAVGPLPMDKPHGITEPWAGVGFGLERIALMRTKEQNIKKVGRSLVYVNGARIDI

SEQ ID NO: 33 - protein, 275 aa, synthetic construct
  source 1..275: note = aaRS with selectivity to CbzK
MDTRLTPAQAQRIREMGGTVDPSLAFSSEAERESAFQRISADLQGANLAKIRRCAEAPERHPIGSLENTLACALAAKGFIEVKTPMMIPADGLVKMGIDESHPLWNQVFWVGPKKALRPMLAPNLGFLLRHLRRSVPAPLLLFEIGPCFRKESRGSNHLEEFTMLNLVELAPQADATERLKEHIATVMNAVGLPYELVVEGSEVYGTTIDVEVDGVELASGAVGPLPMDKPHGITEPWAGVGFGLERIALMRTKEQNIKKVGRSLVYVNGARIDI

SEQ ID NO: 34 - protein, 275 aa, synthetic construct
  source 1..275: note = aaRS with selectivity to NMH
MDTRLTPAQAQRIREMGGTVDPSLAFSSEAERESAFQRISADLQGANLAKIRRCAEAPERHPIGSLENTLACALAAKGFIEVKTPMMIPADGLVKMGIDESHPLWNQVFWVGPKKALRPMMAPNIFFLARHLRRSVPAPLLLFEIGPCFRKESRGSNHLEEFTMLNLFELAPQADATERLKEHIATVMNAVGLPYELVVEGSEVYGTTIDVEVDGVELASGAVGPLPMDKPHGITEPWAGVGFGLERIALMRTKEQNIKKVGRSLVYVNGARIDI

SEQ ID NO: 35 - protein, 281 aa, Nitrososphaeria archaeon
MSKIRFTRGQIHRLIELGAEPTELERDFETEAERDKEFNKIAENLARKNLKNIKDFLEQRRKPLVRVIEEKLRTTALRLGFSEVVTPIIIPRLFIKRMGIDEGDPLWKQVMLIDDKRALRPMLAPNLYVLMAKLSNIVRPVKIFEIGPCFRRETGGRYHLEEFTMFNMVELAPEGDPKERLLDYIDTIMRDIGLNYTISVEPSNVYGETLDVVVNGIEVASAAIGPKPIDANWGVREPWIGVGFGVERLAMLVGGYNSIARIAKSLSYLDGSTLSVIKLRW

SEQ ID NO: 36 - protein, 281 aa, synthetic construct
  source 1..281: note = aaRS with selectivity to NMH
MSKIRFTRGQIHRLIELGAEPTELERDFETEAERDKEFNKIAENLARKNLKNIKDFLEQRRKPLVRVIEEKLRTTALRLGFSEVVTPIIIPRLFIKRMGIDEGDPLWKQVMLIDDKRALRPMMAPNIFVLAAKLSNIVRPVKIFEIGPCFRRETGGRYHLEEFTMFNMFELAPEGDPKERLLDYIDTIMRDIGLNYTISVEPSNVYGETLDVVVNGIEVASAAIGPKPIDANWGVREPWIGVGFGVERLAMLVGGYNSIARIAKSLSYLDGSTLSVIKLRW

SEQ ID NO: 37 - protein, 278 aa, unidentified
  source 1..278: note = Clostridiales bacterium
MENFTITQTERLKQLNCENDVLELEFEDSEARNSKFREIEIGRVKKGKENIKNLLKEKHITISDEVGNKLSDWLMSKDYTKVLTPTIISKDQLKAMTIDEENHLFSQVFWIDNNKCLRPMLAPNLYIVMRELKRITNEPVKIFEIGSCFRKESQGARHMNEFTMLNMVELASVEDGKQLDTLKALAHEAMESLGVESYELVIEESAVYGSTLDIEIDGIEVASGSYGPHELDANWDIFDTWVGIGFGIERLAMAINGGSTIKKYGRSINFIDGETMKL

SEQ ID NO: 38 - protein, 278 aa, synthetic construct
  source 1..278: note = aaRS with selectivity to CbzK
MENFTITQTERLKQLNCENDVLELEFEDSEARNSKFREIEIGRVKKGKENIKNLLKEKHITISDEVGNKLSDWLMSKDYTKVLTPTIISKDQLKAMTIDEENHLFSQVFWIDNNKCLRPMLAPNLGIVLRELKRITNEPVKIFEIGSCFRKESQGARHMNEFTMLNMVELASVEDGKQLDTLKALAHEAMESLGVESYELVIEESAVYGSTLDIEIDGIEVASGSYGPHELDANWDIFDTWVGIGFGIERLAMAINGGSTIKKYGRSINFIDGETMKL

SEQ ID NO: 39 - protein, 278 aa, synthetic construct
  source 1..278: note = aaRS with selectivity to CbzK
MENFTITQTERLKQLNCENDVLELEFEDSEARNSKFREIEIGRVKKGKENIKNLLKEKHITISDEVGNKLSDWLMSKDYTKVLTPTIISKDQLKAMTIDEENHLFSQVFWIDNNKCLRPMLAPNLYIVARELKRITNEPVKIFEIGSCFRKESQGARHMNEFTMLNMVELASVEDGKQLDTLKALAHEAMESLGVESYELVIEESAVFGSTLDIEIDGIEVASGSYGPHELDANWDIFDTWVGIGFGIERLAMAINGGSTIKKYGRSINFIDGETMKL

SEQ ID NO: 40 - protein, 272 aa, Methanonatronarchaeum thermophilum
MEFTVTQKQRLQELGFEGVFPSDFEDVDERNRFFEELVGRLRDRNRKRFERLVGNKIPFWRKVSSDLRNRFYELGFVEVRTPEIISYSLLEKMEISDDLREQVYWLEEDNRCLRPMLAPNLYNELRHFNRISNQSKVRIFEIGTCFRREKSSSEHLNEFTMLNAVEMGDIGDTEERLDRLIEEVFGEFTDYKKVGEESSLYGKTVDVLVDGVEVASCIAGPHPLDSNWSIDQPWVGIGLGVERLAMLLDDGSTAKAYGNSYIYQDGVRLDIK

SEQ ID NO: 41 - protein, 279 aa, unidentified
  source 1..279: note = Gemmatimonadetes bacterium
MGITWSKTQKDRLRALRADGARLADSFEGRPQRDQAFQDLEGALAKARRKELEDLRAGHGRPGLCRLQTTLEGTLVGAGFVQVATPTIMSRGLLAKMGVTKNHDLFEQVFWLDRDRCLRPMLAPHLYYVIKDLLRLWEKPLGIFEVGSCFRKDSQGARHSNEFTMLNLCEFGLPEEDRGGRLREMAEVVTRAAGVHEYELEESASTVYGGTLDVVSVDGLELGSGAMGPHPLDHAWRITDTWVGIGFGLERLLMTVNRETSIGKMGRSLAYLDGIPLSI

SEQ ID NO: 42 - protein, 277 aa, unidentified
  source 1..277: note = Peptostreptococcaceae bacterium pGA-8
MQYSNTQRERLVQLNIDASLLEATFEDAEARDASFRSLEKELAKKAKTHLRSLLSSDAVTGSQAVGNTLCSWLQQKGFTRVDTPTIISDKMLDKMSIDDKHHLREQVFWIDRHKCLRPMLAPNLYIVMRELKKTLNTPVKIFEMGSCFRKESQGARHMNEFTMLNFVELATVKDGEQKEYLEKMAREAMAALKIDDYELIIEESTVYGTTVDIEIDGIEVASGAYGPHELDSAWAVFDTWVGIGFGIERLAMAMNGGKTIKRFGRSTNYLDGVPISL

SEQ ID NO: 43 - protein, 277 aa, Desulfosporosinus sp.
  source 1..277: note = 12
MGIIWTPIQKQRLQELNASEAQREMCFESQQARDRAFQEQEHSLVVEGKRRLMELRDIKRRPSLSVLEQQLVEALTQQGFVQVVTPTIISKTSLAKMSVSDDHPLFSQVFWLDSKRCLRPMLAPNLYTLWKDLLRLWEKPIRIFEIGTCYRKESKGSLHLNEFTMLNLTELGLPEDQRHQRLEELASLVMETVGIADYEMELTTSVVYGDTLDVVKGIELGSSAMGPHPLDDQWGIIDPWVGIGFGLERLLMIKEGSQNVQSMGRSLTYLNGVRLNI

SEQ ID NO: 44 - protein, 279 aa, unidentified
  source 1..279: note = Deltaproteobacteria
MIPWTQTQTQRLNELNAPDSALKKSFDGEPAREKAYQALEKSLVTTQRRRLAEFQTTHRRPELCRLENKLAEMLTQDGFAQVTTPIIMSRGLLKKMSIDSKHPLNSQIFWLQEDKCLRPMLAPHLYYLLVDLLRIWKRPVRIFEIGPCFRKESRGSKHASEFTMLNLVEMGTPENTRRERIQDVGSRVATAAGVKNYRFETVTSEIYGDTIDIVAGKDGLEIASAAMGPHPLDRPWKINESWIGIGFGLERLLMASHRSRNLARFGRSLAYLDGVRLNI

SEQ ID NO: 45 - protein, 281 aa, unidentified
  source 1..281: note = Deltaproteobacteria
MNSSWTEVQRHRLKELNGAEKDLETAFGDDLQRNRAFQKLEKQLVYQERKRLDRLLDTRFRPLRCELESLLIDALKCEGFTRVETPTIISQNDLERMSIDRSHPFNDQVYRVDSKHCLRPMLAPGLYRLMKDLARIRSGKPVRIFEIGPCFRKETSGARHAGEFTMLNLVEMRIEKGSRRFRIETLAKRIMHAAGIDTYDLVDEPSEVYNTTLDIVCGSDPLEVASCAMGPHPLDAAWGIIDTWVGLGFGLERLLMARENSPGIGKWCKSVSYLDGIRLTL

SEQ ID NO: 46 - RNA, 74 nt, unidentified
  source 1..74: mol_type = tRNA; note = Gemmatimonadetes bacterium
ggggagtggatcgatacaagatcgtgtgggctctaaacccacatagctcggtgtgactccggggctccccacca

SEQ ID NO: 47 - DNA, 73 bp, synthetic construct
  source 1..73: mol_type = other DNA; note = Engineered tRNA
ggggggtagatcggattgatcgcgtggactctaaatccgcgctagacgggtgaaactcccgtactcctcgcca

SEQ ID NO: 48 - DNA, 73 bp, synthetic construct
  source 1..73: mol_type = other DNA; note = Engineered tRNA
ggggcgtcgatcggattgatcgcgtggactctaaatccgcgcgcaacgggtgaaactcccgtacgcctcgcca

SEQ ID NO: 49 - DNA, 73 bp, synthetic construct
  source 1..73: mol_type = other DNA; note = Engineered tRNA
ggggtgttgatcggattgatcgcgtggactctaaatccgcggtagacgggtgaaactcccgtacacctcacca

SEQ ID NO: 50 - DNA, 73 bp, synthetic construct
  source 1..73: mol_type = other DNA; note = Engineered tRNA
ggggtgtagatcggattgatcgcgtggactctaaatccgcgaacaacgggtgaaactcccgtacacctcgcca

SEQ ID NO: 51 - DNA, 73 bp, synthetic construct
  source 1..73: mol_type = other DNA; note = Engineered tRNA
ggggcgttgatcggattgatcgcgtggactctaaatccgcggccgacgggtgaaactcccgtacacctctcca

SEQ ID NO: 52 - DNA, 73 bp, synthetic construct
  source 1..73: mol_type = other DNA; note = Engineered tRNA
ggggggctggtcggggtgaccacggaggctctaaacctcccttagccgggttcaactcccgggtccctcgcca

SEQ ID NO: 53 - DNA, 72 bp, synthetic construct
  source 1..72: mol_type = other DNA; note = Engineered tRNA
ggggggctggtcgggtggccaagggggctctaaaccctcggttgccgggttcaactcccgggctccccacca

SEQ ID NO: 54 - RNA, 72 nt, unidentified
  source 1..72: mol_type = tRNA; note = Peptostreptococcaceae bacterium pGA-8
ggggagtggatcgtattgatcgtatggactctaaatccataaagccgagtgagactctcggactcctcgcca

SEQ ID NO: 55 - RNA, 72 nt, Desulfosporosinus sp.
  source 1..72: mol_type = tRNA; note = 12
ggggggtagatcggattgatcgcgtggactctaaatccgcgtagacgggtgaaactcccgtactcctcgcca

SEQ ID NO: 56 - RNA, 72 nt, unidentified
  source 1..72: mol_type = tRNA; note = Clostridiales bacterium
ggggaacggatcggatggatcacatagactctaaatctatgtagccgagtgaaactctcgggttcctcgcca

SEQ ID NO: 57 - RNA, 74 nt, unidentified
  source 1..74: mol_type = tRNA; note = Deltaproteobacteria
ggggggtggatcgtaatgagatcgtgtggactctaaatccacatagacgggtgcaactcccgtactccccgcca

SEQ ID NO: 58 - RNA, 73 nt, unidentified
  source 1..73: mol_type = tRNA; note = Deltaproteobacteria
ggggagtggatcggatgagatcgcatgggctctaaacccatgtagccgggtgcgactcccgggcttccctcca

SEQ ID NO: 59 - DNA, 6681 bp, synthetic construct
  source 1..6681: mol_type = other DNA; note = Mutagensis plasmid
aagaaaccaattgtccatattgcatcagacattgccgtcactgcgtcttttactggctcttctcgctaacccaaccggtaaccccgcttattaaaagcattctgtaacaaagcgggaccaaagccatgacaaaaacgcgtaacaaaagtgtctataatcacggcagaaaagtccacattgattatttgcacggcgtcacactttgctatgccatagcatttttatccataagattagcggatcctacctgacgctttttatcgcaactctctactgtttctccatacccgtttttttggacgcgtacaactcaagtctgacataaatgaccgctatgagcactgcaattacacgccagatcgttctcgctaccgcaaccaccggtatgaaccagattggtgcgcactatgaaggccacaagatcattgagattggtgccgttgaagtggtgaaccgtcgcctgacgggcaataacttccatgtttatctcaaacccgatcggctggtggatccggaagcctttggcgtacatggtattgccgatgaatttttgctcgataagcccacgtttgccgaagtagccgatgagttcatggactatattcgcggcgcggagttggtgatccataacgcagcgttcgatatcggctttatggactacgagttttcgttgcttaagcgcgatattccgaagaccaatactttctgtaaggtcaccgatagccttgcggtggcgaggaaaatgtttcccggtaagcgcaacagcctcgatgcgttatgtgctcgctacgaaatagataacagtaaacgaacgctgcacggggcattactcgatgcccagatccttgcggaagtttatctggcgatgaccggtggtcaaacgtcgatggcttttgcgatggaaggagagacacaacagcaacaaggtgaagcaacaattcagcgcattgtacgtcaggcaagtaagttacgcgttgtttttgcgacagatgaagagattgcagctcatgaagcccgtctcgatctggtgcagaagaaaggcggaagttgcctctggcgagcataatttaatatcagtaaaccggacataacccatgaagaaaaatcgcgcttttttgaagtgggcagggggcaagtatcccctgcttgatgatattaaacggcatttgcccaagggcgaatgtctggttgagccttttgtaggtgccgggtcggtgtttctcaacaccgacttttctcgttatatccttgccgatatcaatagcgacctgatcagtctctataacattgtgaagatgcgtactgatgagtacgtacaggccgcacgcgagctgtttgttcccgaaacaaattgcgccgaggtttactatcagttccgcgaagagttcaacaaaagccaggatccgttccgtcgggcggtactgtttttatatttgaaccgctacggttacaacggcctgtgtcgttacaatctgcgcggtgagtttaacgtgccgttcggccgctacaaaaaaccctatttcccggaagcagagttgtatcacttcgctgaaaaagcgcagaatgcctttttctattgtgagtcttacgccgatagcatggcgcgcgcagatgatgcatccgtcgtctattgcgatccgccttatgcaccgctgtctgcgaccgccaactttacggcgtatcacacaaacagttttacgcttgaacaacaagcgcatctggcggagatcgccgaaggtctggttgagcgccatattccagtgctgatctccaatcacgatacgatgttaacgcgtgagtggtatcagcgcgcaaaattgcatgtcgtcaaagttcgacgcagtataagcagcaacggcggcacacgtaaaaaggtggacgaactgctggctttgtacaaaccaggagtcgtttcacccgcgaaaaaataattcagctaagacactgcactggattaagatgaaaacgattgaagttgatgatgaactctacagctatattgccagccacactaagcatatcggcgagagcgcatccgacattttacggcgtatgttgaaattttccgccgcatcacagcctgctgctccggtgacgaaagaggttcgcgttgcgtcacctgctatcgtcgaagcgaagccggtcaaaacgattaaagacaaggttcgcgcaatgcgtgaacttctgctttcggatgaatacgcagagcaaaagcgagcggtcaatcgctttatgctgctgttgtctacactatattctcttgacgcccaggcgtttgccgaagcaacggaatcgttgcacggtcgtacacgcgtttactttgcggcagatgaacaaacgctgctgaaaaatggtaatcagaccaagccgaaacatgtgccaggcacgccgtattgggtgatcaccaacaccaacaccggccgtaaatgcagcatgatcgaacacatcatgcagtcgatgcaattcccggcggaattgattgagaaggtttgcggaactatctaacggctgaaattaatgaggtcatacccaaatggatagttcgtttacgcccattgaacaaatgctaaaatttcgcgccagccgccacgaagattttccttatcaggagatccttctgactcgtctttgcatgcacatgcaaagcaagctgctggagaaccgcaataaaatgctgaaggctcagggaattaacgagacgttgtttatggcgttgattacgctggagtctcaggaaaaccacagtattcagccttctgaattaagttgtgctcttggatcatcccgtaccaacgcgacgcgtattgccgatgaactggaaaaacgcggttggatcgaacgtcgtgaaagcgataacgatcgccgctgcctgcatctgcaattaacggaaaaaggtcacgagtttttgcgcgaggttttaccaccgcagcataactgcctgcatcaactctggtccgcgctcagcacaacagaaaaagatcagctcgagcaaatcacccgcaaattgctctcccgtctcgaccagatggaacaagacggtgtggttctcgaagcgatgagctaataatacaaaaattaggaggaatttcaacatgacaaatttatctgacatcattgaaaaagaaacaggaaaacaactagtgattcaagaatcaattctaatgttaccagaagaagtagaggaagtaattgggaataaaccagaaagtgatattttagttcatactgcttatgatgaaagtacagatgaaaatgtaatgctattaacttcagatgctccagaatataaaccttgggctttagtaattcaagacagtaatggagaaaataaaattaaaatgttataagtcgagattaagtaaaccggaatctgaagatgaccgacgcggaatacgttcgtatccacgaaaaactggacatctacaccttcaaaaaacagttcttcaacaacaaaaaatctgtttctcaccgttgctacgttctgttcgaactgaaacgtcgtggtgaacgtcgtgcgtgcttctggggttacgcggttaacaaaccgcagtctggtaccgaacgtggtatccacgcggaaatcttctctatccgtaaagttgaagaatacctgcgtgacaacccgggtcagttcaccatcaactggtactcttcttggtctccgtgcgcggactgcgcggaaaaaatcctggaatggtacaaccaggaactgcgtggtaacggtcacaccctgaaaatctgggcgtgcaaactgtactacgaaaaaaacgcgcgtaaccagatcggtctgtggaacctgcgtgacaacggtgttggtctgaacgttatggtttctgaacactaccagtgctgccgtaaaatcttcatccagtcttctcacaaccagctgaacgaaaaccgttggctggaaaaaaccctgaaacgtgcggaaaaacgtcgttctgaactgtctatcatgatccaggttaaaatcctgcacaccaccaaatctccggcggtttaaacttaattaacggcactcctcagccaagtcaaaagcctccggtcggaggcttttgactacatgcccatggcgtttacgccccgccctgccactcatcgcagtactgttgtaattcattaagcattctgccgacatggaagccatcacaaacggcatgatgaacctgaatcgccagcggcatcagcaccttgtcgccttgcgtataatatttgcccatagtgaaaacgggggcgaagaagttgtccatattggccacgtttaaatcaaaactggtgaaactcacccagggattggctgagacgaaaaacatattctcaataaaccctttagggaaataggccaggttttcaccgtaacacgccacatcttgcgaatatatgtgtagaaactgccggaaatcgtcgtggtattcactccagagcgatgaaaacgtttcagtttgctcatggaaaacggtgtaacaagggtgaacactatcccatatcaccagctcaccgtctttcattgccatacggaactccggatgagcattcatcaggcgggcaagaatgtgaataaaggccggataaaacttgtgcttatttttctttacggtctttaaaaaggccgtaatatccagctgaacggtctggttataggtacattgagtaactgactgaaatgcctcaaaatgttctttacgatgccattgggatatatcaacggtggtatatccagtgatttttttctccattttagcttccttagctcctgaaaatctcgataactcaaaaaatacgcccggtagtgatcttatttcattatggtgaaagttggaacctcttacgtgccaagccaaataggccgtcactcggtcgctacgctccgggcgtgagactgcggcgggcgctgcggacacatacaaagttacccacagattccgtggataagcaggggactaacatgtgaggcaaaacagcagggccgcgccggtggcgtttttccataggctccgccctcctgccagagttcacataaacagacgcttttccggtgcatctgtgggagccgtgaggctcaaccatgaatctgacagtacgggcgaaacccgacaggacttaaagatccccaccgtttccggcgggtcgctccctcttgcgctctcctgttccgaccctgccgtttaccggatacctgttccgcctttctcccttacgggaagtgtggcgctttctcatagctcacacactggtatctcggctcggtgtaggtcgttcgctccaagctgggctgtaagcaagaactccccgttcagcccgactgctgcgccttatccggtaactgttcacttgagtccaacccggaaaagcacggtaaaacgccactggcagcagccattggtaactgggagttcgcagaggatttgtttagctaaacacgcggttgctcttgaagtgtgcgccaaagtccggctacactggaaggacagatttggttgctgtgctctgcgaaagccagttaccacggttaagcagttccccaactgacttaaccttcgatcaaaccacctccccaggtggttttttcgtttacagggcaaaagattacgcgcagaaaaaaaggatctcaagaagatcctttgatcttttctactgaaccgctctagatttcagtgcaatttatctcttcaaatgtagcacctgaagtcagcccaggaggaagaggacatccggtcaaataaaacgaaaggctcagtcgaaagactgggcctttcgttttagacttagggaccctttatgacaacttgacggctacatcattcactttttcttcacaaccggcacggaactcgctcgggctggccccggtgcattttttaaatacccgcgagaaatagagttgatcgtcaaaaccaacattgcgaccgacggtggcgataggcatccgggtggtgctcaaaagcagcttcgcctggctgatacgttggtcctcgcgccagcttaagacgctaatccctaactgctggcggaaaagatgtgacagacgcgacggcgacaagcaaacatgctgtgcgacgctggcgatatcaaaattgctgtctgccaggtgatcgctgatgtactgacaagcctcgcgtacccgattatccatcggtggatggagcgactcgttaatcgcttccatgcgccgcagtaacaattgctcaagcagatttatcgccagcagctccgaatagcgcccttccccttgcccggcgttaatgatttgcccaaacaggtcgctgaaatgcggctggtgcgcttcatccgggcgaaagaaccccgtattggcaaatattgacggccagttaagccattcatgccagtaggcgcgcggacgaaagtaaacccactggtgataccattcgcgagcctccggatgacgaccgtagtgatgaatctctcctggcgggaacagcaaaatatcacccggtcggcaaacaaattctcgtccctgatttttcaccaccccctgaccgcgaatggtgagattgagaatataacctttcattcccagcggtcggtcgataaaaaaatcgagataaccgttggcctcaatcggcgttaaacccgccaccagatgggcattaaacgagtatcccggcagcaggggatcattttgcgcttcagccatacttttcatactcccaccattcagag

SEQ ID NO: 60 - protein, 419 aa, Methanosarcina barkeri
MDKKPLDVLISATGLWMSRTGTLHKIKHHEVSRSKIYIEMACGDHLVVNNSRSCRTARAFRHHKYRKTCKRCRVSDEDINNFLTRSTESKNSVKVRVVSAPKVKKAMPKSVSRAPKPLENSVSAKASTNTSRSVPSPAKSTPNSSVPASAPAPSLTRSQLDRVEALLSPEDKISLNMAKPFRELEPELVTRRKNDFQRLYTNDREDYLGKLERDITKFFVDRGFLEIKSPILIPAEYVERMGINNDTELSKQIFRVDKNLCLRPMLAPTLYNYLRKLDRILPGPIKIFEVGPCYRKESDGKEHLEEFTMVNFCQMGSGCTRENLEALIKEFLDYLEIDFEIVGDSCMVYGDTLDIMHGDLELSSAVVGPVSLDREWGIDKPWIGAGFGLERLLKVMHGFKNIKRASRSESYYNGISTNL

SEQ ID NO: 61 - DNA, 72 bp, synthetic construct
  misc_difference 29..31: note = misc_feature - n is a, c, g, or t
  source 1..72: mol_type = other DNA; note = Engineered tRNA
gggggacggtccggcgaccagcgggtctnnnaaacctagccttgcggggttcgacaccccggtctctcgcca

SEQ ID NO: 62 - DNA, 75 bp, synthetic construct
  misc_difference 33..35: note = misc_feature - n is a, c, g, or t
  source 1..75: mol_type = other DNA; note = Engineered tRNA
cccgccctagctcagaggtagagcgtgcttctnnnaaaagcatggtccccggttcaaatcctgggggcgggacca

SEQ ID NO: 63 - DNA, 72 bp, synthetic construct
  misc_difference 31..33: note = misc_feature - n is a, c, g, or t
  source 1..72: mol_type = other DNA; note = Engineered tRNA
ggaaacctgatcatgtagatcgaatggactnnnaatccgttcagccgggttagattcccggggtttccgcca

SEQ ID NO: 64 - DNA, 77 bp, synthetic construct
  misc_difference 35..37: note = misc_feature - n is a, c, g, or t
  source 1..77: mol_type = other DNA; note = Engineered tRNA
ccggcggtagttcagcagggcagaacggcggactnnnaatccgcatggcaggggttcaaatcccctccgccggacca

SEQ ID NO: 65 - DNA, 72 bp, synthetic construct
  misc_difference 29..31: note = misc_feature - n is a, c, g, or t
  source 1..72: mol_type = other DNA; note = Engineered tRNA
ggcgaactggtccgggaccaccaggcctnnnaagccacggttagccgggttcaactcccgggttcgtcgcca

SEQ ID NO: 66 - RNA, 72 nt, Mytilicola intestinalis
  source 1..72: mol_type = tRNA
ggcgaactggtccgggaccaccaggcctctaaagccacggttagccgggttcaactcccgggttcgtcgcca

SEQ ID NO: 67 - DNA, 6681 bp, synthetic construct
  source 1..6681: mol_type = other DNA; note = Recoded mutagensis plasmid
aagaaaccaattgtccatattgcatcagacattgccgtcactgcgtcttttactggctcttctcgctaacccaaccggtaaccccgcttattaaaagcattctgtaacaaagcgggaccaaagccatgacaaaaacgcgtaacaaaagtgtctataatcacggcagaaaagtccacattgattatttgcacggcgtcacactttgctatgccatagcatttttatccataagattagcggatcctacctgacgctttttatcgcaactctctactgtttctccatacccgtttttttggacgcgtacaactcaagtctgacataaatgaccgctatgagcactgcaattacacgccagatcgttctcgctaccgcaaccaccggtatgaaccagattggtgcgcactatgaaggccacaagatcattgagattggtgccgttgaagtggtgaaccgtcgcctgacgggcaataacttccatgtttatctcaaacccgatcggctggtggatccggaagcctttggcgtacatggtattgccgatgaatttttgctcgataagcccacgtttgccgaagtagccgatgagttcatggactatattcgcggcgcggagttggtgatccataacgcagcgttcgatatcggctttatggactacgagtttagcttgcttaagcgcgatattccgaagaccaatactttctgtaaggtcaccgatagccttgcggtggcgaggaaaatgtttcccggtaagcgcaacagcctcgatgcgttatgtgctcgctacgaaatagataacagtaaacgaacgctgcacggggcattactcgatgcccagatccttgcggaagtttatctggcgatgaccggtggtcaaacgagcatggcttttgcgatggaaggagagacacaacagcaacaaggtgaagcaacaattcagcgcattgtacgtcaggcaagtaagttacgcgttgtttttgcgacagatgaagagattgcagctcatgaagcccgtctcgatctggtgcagaagaaaggcggaagttgcctctggcgagcataatttaatatcagtaaaccggacataacccatgaagaaaaatcgcgcttttttgaagtgggcagggggcaagtatcccctgcttgatgatattaaacggcatttgcccaagggcgaatgtctggttgagccttttgtaggtgccgggagcgtgtttctcaacaccgacttttctcgttatatccttgccgatatcaatagcgacctgatcagtctctataacattgtgaagatgcgtactgatgagtacgtacaggccgcacgcgagctgtttgttcccgaaacaaattgcgccgaggtttactatcagttccgcgaagagttcaacaaaagccaggatccgttccgtcgggcggtactgtttttatatttgaaccgctacggttacaacggcctgtgtcgttacaatctgcgcggtgagtttaacgtgccgttcggccgctacaaaaaaccctatttcccggaagcagagttgtatcacttcgctgaaaaagcgcagaatgcctttttctattgtgagtcttacgccgatagcatggcgcgcgcagatgatgcatccgtcgtctattgcgatccgccttatgcaccgctgtctgcgaccgccaactttacggcgtatcacacaaacagttttacgcttgaacaacaagcgcatctggcggagatcgccgaaggtctggttgagcgccatattccagtgctgatctccaatcacgatacgatgttaacgcgtgagtggtatcagcgcgcaaaattgcatgtcgtcaaagttcgacgcagtataagcagcaacggcggcacacgtaaaaaggtggacgaactgctggctttgtacaaaccaggagtcgttagtcccgcgaaaaaataattcagctaagacactgcactggattaagatgaaaacgattgaagttgatgatgaactctacagctatattgccagccacactaagcatatcggcgagagcgcatccgacattttacggcgtatgttgaaattttccgccgcaagtcagcctgctgctccggtgacgaaagaggttcgcgttgcgagtcctgctatcgtcgaagcgaagccggtcaaaacgattaaagacaaggttcgcgcaatgcgtgaacttctgcttagcgatgaatacgcagagcaaaagcgagcggtcaatcgctttatgctgctgttgtctacactatattctcttgacgcccaggcgtttgccgaagcaacggaaagcttgcacggtcgtacacgcgtttactttgcggcagatgaacaaacgctgctgaaaaatggtaatcagaccaagccgaaacatgtgccaggcacgccgtattgggtgatcaccaacaccaacaccggccgtaaatgcagcatgatcgaacacatcatgcagagcatgcaattcccggcggaattgattgagaaggtttgcggaactatctaacggctgaaattaatgaggtcatacccaaatggatagtagctttacgcccattgaacaaatgctaaaatttcgcgccagccgccacgaagattttccttatcaggagatccttctgactcgtctttgcatgcacatgcaaagcaagctgctggagaaccgcaataaaatgctgaaggctcagggaattaacgagacgttgtttatggcgttgattacgctggagtctcaggaaaaccacagtattcagccttctgaattaagttgtgctcttggaagttcccgtaccaacgcgacgcgtattgccgatgaactggaaaaacgcggttggatcgaacgtcgtgaaagcgataacgatcgccgctgcctgcatctgcaattaacggaaaaaggtcacgagtttttgcgcgaggttttaccaccgcagcataactgcctgcatcaactctggtccgcgctcagcacaacagaaaaagatcagctcgagcaaatcacccgcaaattgctctcccgtctcgaccagatggaacaagacggtgtggttctcgaagcgatgagctaataatacaaaaattaggaggaatttcaacatgacaaatttatctgacatcattgaaaaagaaacaggaaaacaactagtgattcaagaaagtattctaatgttaccagaagaagtagaggaagtaattgggaataaaccagaaagtgatattttagttcatactgcttatgatgaaagtacagatgaaaatgtaatgctattaactagtgatgctccagaatataaaccttgggctttagtaattcaagacagtaatggagaaaataaaattaaaatgttataagtcgagattaagtaaaccggaatctgaagatgaccgacgcggaatacgttcgtatccacgaaaaactggacatctacaccttcaaaaaacagttcttcaacaacaaaaaatctgtttctcaccgttgctacgttctgttcgaactgaaacgtcgtggtgaacgtcgtgcgtgcttctggggttacgcggttaacaaaccgcagtctggtaccgaacgtggtatccacgcggaaatcttctctatccgtaaagttgaagaatacctgcgtgacaacccgggtcagttcaccatcaactggtactcttcttggtctccgtgcgcggactgcgcggaaaaaatcctggaatggtacaaccaggaactgcgtggtaacggtcacaccctgaaaatctgggcgtgcaaactgtactacgaaaaaaacgcgcgtaaccagatcggtctgtggaacctgcgtgacaacggtgttggtctgaacgttatggtttctgaacactaccagtgctgccgtaaaatcttcatccagtcttctcacaaccagctgaacgaaaaccgttggctggaaaaaaccctgaaacgtgcggaaaaacgtcgttctgaactgtctatcatgatccaggttaaaatcctgcacaccaccaaatctccggcggtttaaacttaattaacggcactcctcagccaagtcaaaagcctccggtcggaggcttttgactacatgcccatggcgtttacgccccgccctgccactcatcgcagtactgttgtaattcattaagcattctgccgacatggaagccatcacaaacggcatgatgaacctgaatcgccagcggcatcagcaccttgtcgccttgcgtataatatttgcccatagtgaaaacgggggcgaagaagttgtccatattggccacgtttaaatcaaaactggtgaaactcacccagggattggcactgacgaaaaacatattctcaataaaccctttagggaaataggccaggttttcaccgtaacacgccacatcttggctatatatgtgtagaaactgccggaaatcgtcgtggtattcactccagaggctactaaacgtttcagtttgctcatggaaaacggtgtaacaagggtgaacactatcccatatcaccagctcaccgtctttcattgccatacggaactccggatgagcattcatcaggcgggcaagaatgtgaataaaggccggataaaacttgtgcttatttttctttacggtctttaaaaaggccgtaatatccagctgaacggtctggttataggtacattgagtaacactctgaaatgcctcaaaatgttctttacgatgccattgggatatatcaacggtggtatatccagtgatttttttctccattttagcttccttagctcctgaaaatctcgataactcaaaaaatacgcccggtagtgatcttatttcattatggtgaaagttggaacctcttacgtgccaagccaaataggccgtcactcggtcgctacgctccgggcgtgagactgcggcgggcgctgcggacacatacaaagttacccacagattccgtggataagcaggggactaacatgtgaggcaaaacagcagggccgcgccggtggcgtttttccataggctccgccctcctgccagagttcacataaacagacgcttttccggtgcatctgtgggagccgtgaggctcaaccatgaatctgacagtacgggcgaaacccgacaggacttaaagatccccaccgtttccggcgggtcgctccctcttgcgctctcctgttccgaccctgccgtttaccggatacctgttccgcctttctcccttacgggaagtgtggcgctttctcatagctcacacactggtatctcggctcggtgtaggtcgttcgctccaagctgggctgtaagcaagaactccccgttcagcccgactgctgcgccttatccggtaactgttcacttgagtccaacccggaaaagcacggtaaaacgccactggcagcagccattggtaactgggagttcgcagaggatttgtttagctaaacacgcggttgctcttgaagtgtgcgccaaagtccggctacactggaaggacagatttggttgctgtgctctgcgaaagccagttaccacggttaagcagttccccaactgacttaaccttcgatcaaaccacctccccaggtggttttttcgtttacagggcaaaagattacgcgcagaaaaaaaggatctcaagaagatcctttgatcttttctactgaaccgctctagatttcagtgcaatttatctcttcaaatgtagcacctgaagtcagcccaggaggaagaggacatccggtcaaataaaacgaaaggctcagtcgaaagactgggcctttcgttttagacttagggaccctttaactcaacttgacggctacatcattcactttttcttcacaaccggcacggaactcgctcgggctggccccggtgcattttttaaatacccggctgaaatagagttgatcgtcaaaaccaacattgcgaccgacggtggcgataggcatccgggtggtgctcaaaagcagcttcgcctggctgatacgttggtcctcgcgccagcttaagacgctaatccctaactgctggcggaaaagatgactcagacggctcgggctcaagcaaacatgctgtgcgacgctggcgatatcaaaattgctgtctgccaggtgatcgctgatgtactgacaagcctcgcgtacccgattatccatcggtggatggaggctctcgttaatcgcttccatgcgccgcagtaacaattgctcaagcagatttatcgccagcagctcgctatagcgcccttccccttgcccggcgttaatgatttgcccaaacaggtcgctgaaatgcggctggtgcgcttcatccgggcgaaagaaccccgtattggcaaatatactcggccagttaagccattcatgccagtaggcgcgcggacgaaagtaaacccactggtgataccattcgcgagcctccggatgacgaccgtagtgatgaatctctcctggcgggaacagcaaaatatcacccggtcggcaaacaaattctcgtccctgatttttcaccaccccctgaccgcgaatggtgagattgagaatataacctttcattcccagcggtcggtcgataaaaaaatcgagataaccgttggcctcaatcggcgttaaacccgccaccagatgggcattaaagctgtatcccggcagcaggggatcattttgcgcttcagccatacttttcatactcccaccattcagag

SEQ ID NO: 68 - DNA, 24 bp, synthetic construct
  source 1..24: mol_type = other DNA
atggcttcgtagtcgtagtcgtag

SEQ ID NO: 69 - DNA, 12 bp, synthetic construct
  source 1..12: mol_type = other DNA
tcgtagtcgtag

SEQ ID NO: 70 - DNA, 18 bp, synthetic construct
  source 1..18: mol_type = other DNA
tcgtagtcgtagtcgtag

SEQ ID NO: 71 - DNA, 15 bp, synthetic construct
  source 1..15: mol_type = other DNA
tgttcgtagtcgtag

SEQ ID NO: 72 - DNA, 18 bp, synthetic construct
  source 1..18: mol_type = other DNA
atggcttcgtagtcgtag

SEQ ID NO: 73 - DNA, 18 bp, synthetic construct
  source 1..18: mol_type = other DNA
atggcttagtcgtagtcg

SEQ ID NO: 74 - DNA, 18 bp, synthetic construct
  source 1..18: mol_type = other DNA
atggcttcgtagtagtcg

SEQ ID NO: 75 - DNA, 18 bp, synthetic construct
  source 1..18: mol_type = other DNA
atggcttagtcgtcgtag

SEQ ID NO: 76 - DNA, 18 bp, synthetic construct
  source 1..18: mol_type = other DNA
atggcttcgtcgtagtag

SEQ ID NO: 77 - DNA, 18 bp, synthetic construct
  source 1..18: mol_type = other DNA
atggcttagtagtcgtcg

SEQ ID NO: 78 - DNA, 30 bp, synthetic construct
  source 1..30: mol_type = other DNA
atggcttcgtagtcgtagtcgtagtcgtag

SEQ ID NO: 79 - DNA, 12 bp, synthetic construct
  source 1..12: mol_type = other DNA
tcgtagtcgtag

SEQ ID NO: 80 - DNA, 15 bp, synthetic construct
  source 1..15: mol_type = other DNA
tgttcgtagtcgtag
